(19) United States
(12) Patent Application Publication
(10) Pub. No.: US 2011/0265199 A1
(43) Pub. Date: Oct. 27, 2011

(54) NUCLEOTIDE SEQUENCES AND POLYPEPTIDES ENCODED THEREBY USEFUL FOR INCREASING TOLERANCE TO OXIDATIVE STRESS IN PLANTS

(75) Inventor: Fasong Zhou, Oxnard, CA (US)

(73) Assignee: CERES, INC., Thousand Oaks, CA (US)

(21) Appl. No.: 12/445,005

(22) PCT Filed: Oct. 12, 2007
(86) PCT No.: PCT/US07/81301

§ 371 Date: Jul. 13, 2011

Related U.S. Application Data
(60) Provisional application No. 60/851,585, filed on Oct. 12, 2006.

(51) Int. Cl. A01H 1/02; C12N 5/04; C12Q 1/68; A01H 5/10; C12N 15/11; A01H 1/00; A01H 5/00

(52) U.S. Cl. 800/260; 800/278; 435/419; 800/298; 800/320; 800/320.1; 800/320.3; 800/314; 800/320.2; 800/322; 536/23.1; 435/6.11

(57) ABSTRACT

The present invention relates to isolated nucleic acid molecules and their corresponding encoded polypeptides able confer the trait of improved plant size, vegetative growth, growth rate, seedling vigor and/or biomass in plants challenged with oxidative stress conditions. The present invention further relates to the use of these nucleic acid molecules and polypeptides in making transgenic plants, plant cells, plant materials or seeds of a plant having plant size, vegetative growth, growth rate, seedling vigor and/or biomass that are improved in oxidative stress conditions with respect to wild-type plants grown under similar conditions.

### TECHNICAL FIELD

[0001] The present invention relates to isolated nucleic acid molecules and their corresponding encoded polypeptides able to enhance plant growth under oxidative stress conditions. The present invention further relates to using the nucleic acid molecules and polypeptides to make transgenic plants, plant cells, plant materials or seeds of a plant having improved growth rate, vegetative growth, seedling vigor and/or biomass under oxidative stress conditions as compared to wild-type plants grown under similar conditions. The present invention also relates to novel screening methods which comprise using sodium salicylate to induce endogenous hydrogen peroxide production and cell death (oxidative stress) or nitric oxide synthase (NOS) to induce excessive amount of nitric oxide (NO) production and stunted growth and to subsequently screen for genes and plant lines that enhance plant growth under oxidative stress conditions or high NO conditions

### BACKGROUND

[0002] Plants lead a sessile lifestyle and so are generally destined to reside where their seed germinates. Consequently, they can be exposed to unfavorable environmental conditions arising from weather, pollution and location. Stress conditions, such as extremes in temperature, drought and desiccation, salinity, soil nutrient content, heavy metals, UV radiation, pollutants such as ozone and SO₂, mechanical stress, high light and pathogen attack, have a large impact on plant growth and development. These types of stress exposure induce formation of toxic oxygen species, which are generated in all aerobic cells and are associated with oxidative damage at the cellular level. Several recently published reports have characterized toxic oxygen species generation and the subsequent oxidative damage caused by abiotic stresses (see Larkindale and Knight (2002); Borsani et al. (2001); Lee et al (2004); Aroca et al (2005); Luna et al (2005); and Noctor et al (2002)).

[0003] The toxic oxygen species are referred to as reactive oxygen species (ROS), reactive oxygen intermediates (ROI) or activated oxygen species (AOS) and are partially reduced or activated derivatives of oxygen. ROS/ROI/AOS include the oxygen-centered superoxide (O₂) and hydroxyl (.OH) free radicals as well as hydrogen peroxide (H₂O₂), nitric oxide (NO) and O₂¹. These oxygen species are generated as byproducts from reactions that occur during photosynthesis, respiration and photorespiration, and are predominantly formed in the chloroplasts, mitochondria, endoplasmic reticulum, microbodies (e.g. peroxisomes and glyoxysomes), plasma membranes and cell walls. While the toxicity of O₂⁻ and H₂O₂ themselves is relatively low, their metal-dependent conversion to highly toxic .OH is thought to be responsible for the majority of the biological damage associated with these molecules.

[0004] Oxidative stress damages cell structure and affects cell metabolism and catabolism. Membrane lipids are subject to oxidation by ROS/ROI/AOS, resulting in accumulation of high molecular weight, cross-linked fatty acids and phospholipids. Oxidative attack on proteins results in site-specific amino acid modifications, fragmentation of the peptide chain, aggregation of cross-linked reaction products, altered electrical charge and increased susceptibility to proteolysis, all of which frequently leads to elimination of enzyme activity. ROS/ROI/AOS that generate oxygen free radicals, such as ionizing radiation, also induce numerous lesions in DNA at both the sugar and base moieties which cause deletions, mutation and other lethal genetic effects such as base degradation, single strand breakage and cross-linking to proteins. Morphologically, the adverse effects of high levels of ROS accumulation are manifested as stunted growth and necrotic lesions.

[0005] Although capable of producing damage, ROS/ROI/AOS are also key regulators of metabolic and defense pathways, playing roles as signaling or secondary messenger molecules. For example, pathogen-induced ROS/ROI/AOS production is critical in disease resistance where these molecules are involved at three different levels: penetration resistance, hypersensitive response (HR) and systemic acquired resistance (Levine et al. (1994); Lamb and Dixon (1997); Zhou et al. (2000); Aviv et al. (2002)). In penetration resistance, ROS/ROI/AOS function by reinforcing cell walls through polyphenolic cross-linking. With respect to hypersensitive response, H₂O₂ is an active signaling molecule whose effect is dose dependent. At high dosages, H₂O₂ triggers hypersensitive cell death and thus restricts the pathogen to local infection sites (Lamb and Dixon (1997)) while low dosages block cell cycle progression (Reichheld et al. (1999)) and signal secondary wall differentiation (Potikha et al. (1999)). Lastly, ROS/ROI/AOS molecules play a role in broad-spectrum systemic acquired disease resistance by triggering micro-HR systematically after the first pathogen inoculation.

[0006] In the signal cascades leading to oxidative stress, salicylic acid (SA) has been identified as an important signaling molecule to mediate ROS/ROI/AOS accumulation in various stress conditions, such as salt and osmotic stress (Borsani et al. (2001)), drought (Senaratna et al. (2000)), heat (Dat et al. (1998)), cold (Scott et al. (2004)), UV-light (Surplus et al. (1998)), paraquat (Kim et al. (2003)) and disease resistance against different pathogens (Zhou et al. (2004)). High levels of SA induce H₂O₂ production as well as cell death.

[0007] Several signaling components required for SA-mediated ROS/ROI/AOS accumulation and gene expression have been characterized. For example, NPR1 is required for SA-induced PR gene expression and disease resistance (Cao et al. (1994)). The mutations in eds1 and eds5 block SA-mediated signaling and enhance disease susceptibility (Rusterucci et al. (2001)). Over-expression of NahG in various plant species also suppresses SA-induced responses to both abiotic and biotic stresses (Delaney et al. (1994)). Recently, Scott and colleagues (2004) reported that chilling treatment induced accumulation of SA in Arabidopsis and the degradation of SA by overexpression of NahG enhanced cold tolerance in a transgenic plant.

[0008] SA, as a phytohormone, also promotes early flowering (Martinez et al. (2004)). SA at various levels may play different roles in plant growth and stress responses. However, most of the time, the increased tolerance to high levels of SA appears to be beneficial, since it reduces the side effects of SA accumulation while stimulating SA-mediated stress responses.

[0009] Similarly, NO is capable of generating ROS/ROI/AOS and is a plant signaling molecule involved in the regulation of seed germination, stomatal closure (Mata and Lamattina (2001); Desikan et al (2002)), flowering time (He et al. (2004)), antioxidant reactions to suppress cell death (Beligni et al. (2002)) and tolerance to biotic and abiotic stress conditions (Mata and Lamattina (2001)). While the effects of NO can be mimicked through the application of sodium nitroprusside (SNP), endogenous NO production in plants results from the activity of a nitric oxide synthase that uses L-arginine (Guo et al. (2003)) as well as nitrate reductase-mediated reactions (Desikan et al (2002)). NO can react with redox centers in proteins and membranes, thereby causing cell damage and inducing cell death.

[0010] In order to control the two-fold nature of ROS/ROI/AOS molecules, plants have developed a sophisticated regulatory system which involves both production and scavenging of ROS/ROI/AOS in cells. During normal growth and development, this pathway monitors the level of ROS/ROI/AOS produced by metabolism and controls the expression and activity of ROS/ROI/AOS scavenging pathways. The major ROS/ROI/AOS scavenging mechanisms include the action of the superoxide dismutase (SOD), ascorbate perioxidase (APX) and catalase (CAT) enzymes as well as nonenzymatic components such as ascorbic acid, α-tocopherol and glutathione.

[0011] The antioxidant enzymes are believed to be critical components in preventing oxidative stress, in part because pretreatment of plants with one form of stress, and which induces expression of these enzymes, can increase tolerance for a different stress (cross-tolerance) Allen (1995)). In addition, plant lines selected for resistance to herbicides that function by inducing ROS/ROI/AOS generally have increased levels of one or more of these antioxidant enzymes and also exhibit cross-tolerance (Gressel and Galun (1994)).

[0012] Plant development and yield depend on the ability of the plant to manage oxidative stress, whether it is via the signaling or the scavenging pathways. Consequently, improvements in a plant's ability to withstand oxidative stress, or to obtain a higher degree of cross-tolerance once oxidative stress has been experienced, has significant value in agriculture. The sequences and methods of the invention provide the means by which tolerance to oxidative stress can be improved, either via the signaling or the scavenging pathways.

[0013] The availability and sustainability of a stream of food and feed for people and domesticated animals has been a high priority throughout the history of human civilization and lies at the origin of agriculture. Specialists and researchers in the fields of agronomy science, agriculture, crop science, horticulture, and forest science are even today constantly striving to find and produce plants with an increased growth potential to feed an increasing world population and to guarantee a supply of reproducible raw materials. The robust level of research in these fields of science indicates the level of importance leaders in every geographic environment and climate around the world place on providing sustainable sources of food, feed and energy.

[0014] Manipulation of crop performance has been accomplished conventionally for centuries through selection and plant breeding. The breeding process is, however, both time-consuming and labor-intensive. Furthermore, appropriate breeding programs must be specially designed for each relevant plant species.

[0015] On the other hand, great progress has been made in using molecular genetic approaches to manipulate plants to provide better crops. Through the introduction and expression of recombinant nucleic acid molecules in plants, researchers are now poised to provide the community with plant species tailored to grow more efficiently and yield more product despite suboptimal geographic and/or climatic environments. These new approaches have the additional advantage of not being limited to one plant species, but instead being applicable to multiple different plant species (Zhang et al. (2004) Plant Physiol. 135:615; Zhang et al. (2001) Proc. Natl. Acad. Sci. USA 98:12832).

### SUMMARY

[0016] This document provides methods and materials related to plants having modulated levels of tolerance to oxidative stress. For example, this document provides transgenic plants and plant cells having increased levels of tolerance to oxidative stress, nucleic acids used to generate transgenic plants and plant cells having increased levels of tolerance to oxidative stress, and methods for making plants and plant cells having increased levels of tolerance to oxidative stress. Such plants and plant cells provide the opportunity to produce crops or plants under oxidative stress conditions without stunted growth and diminished yields. Increased levels of tolerance to oxidative stress may be useful to produce biomass which may be converted to a liquid fuel or other chemicals and/or to produce food and feed on land that is currently marginally productive, resulting in an overall expansion of arable land.

[0017] Methods of producing a plant and/or plant tissue are provided herein. In one aspect, a method comprises growing a plant cell comprising an exogenous nucleic acid. The exogenous nucleic acid comprises a regulatory region operably linked to a nucleotide sequence encoding a polypeptide. The Hidden Markov Model (HMM) bit score of the amino acid sequence of the polypeptide is greater than about 30 using an HMM generated from the amino acid sequences depicted in one of FIGS. 3, 5 and 8. The plant and/or plant tissue has a difference in the level of tolerance to oxidative stress as compared to the corresponding level in tolerance to oxidative stress of a control plant that does not comprise the exogenous nucleic acid. In some embodiments the amino acid sequence of the polypeptide has an HMM bit score greater than about 45 using an HMM generated from the amino acid sequences depicted in FIG. 3. In some embodiments the amino acid sequence of the polypeptide has an HMM bit score greater than about 120 using an HMM generated from the amino acid sequences depicted in FIG. 5. In some embodiments the amino acid sequence of the polypeptide has an HMM bit score greater than about 115 using an HMM generated from the amino acid sequences depicted in FIG. 8.

[0018] In another aspect, a method comprises growing a plant cell comprising an exogenous nucleic acid. The exogenous nucleic acid comprises a regulatory region operably linked to a nucleotide sequence encoding a polypeptide having 85 percent or greater sequence identity to an amino acid sequence set forth in SEQ ID NOs: 79, 80, 82, 83, 84, 85, 87, 88, 89, 90, 91, 94, 96, 97, 98, 99, 100, 102, 104, 105, 107, 109, 110, 111, 112, 114, 116, 117, 118, 119, 120, 122, 124, 126, 127, 128, 130, 131, 132, 134, 135, 137, 139, 140, 141, 142, 143, 144, 145, 146, 147, 148, 150, 151, 152, 153, 155, 157, 158, 160, 161, 162, 163, 165, 167, 168, 169, 170, 171, 173, 175, 176, 178, 180, 181, 182, 183, 184, 186, 188, 190, 192, 194, 195, 197, 199, 201, 203, 205, 207, 208, 209, 211, 213, 215, 217, 219, 220, 221, 222, 223, 225, 227, 229, 230, 231, 232, 233, 235, 237, 238, 239, 240, 241, 242, 244, 245, 246, 247, 248, 249, 251, 252, 253, 255, 256, 258, 260, 261, 263, 264, 266, 267, 269, 270, 271, 272, 273, 274, 275, 277, 279, 281, 282, 284, 286, 288, 289, 290, 291, 293, 295, 296, 297, 299, 300, 301, 302, 304, 306, 308, 309, 311, 312, 313, 314, 315, 316, 318, 319, 321, 322, 324, 326, 328, 329, 330, 331, 332, 333, 335, 336, 337, 339, 341, 343, 345, 347, 349, 351, 352, 353, 354, 356 and 357. A plant produced from the plant cell has a difference in the level of tolerance to oxidative stress as compared to the corresponding level in a control plant that does not comprise the exogenous nucleic acid.

[0019] In another aspect, a method comprises growing a plant cell comprising an exogenous nucleic acid. The exogenous nucleic acid comprises a regulatory region operably linked to a nucleotide sequence having 85 percent or greater sequence identity to at least a fragment of a nucleotide sequence set forth in SEQ ID NOs. 78, 81, 86, 92, 93, 95, 101, 103, 106, 108, 113, 115, 121, 123, 125, 129, 133, 136, 138, 149, 154, 156, 159, 164, 166, 172, 174, 177, 179, 185, 187, 189, 191, 193, 196, 198, 200, 202, 204, 206, 210, 212, 214, 216, 218, 224, 226, 228, 234, 236, 243, 250, 254, 257, 259, 262, 265, 268, 276, 278, 280, 283, 285, 287, 292, 294, 298, 303, 305, 307, 310, 317, 320, 323, 325, 327, 334, 338, 340, 342, 344, 346, 348, 350 and 355 and to a nucleotide sequence encoding any of the amino acid sequences set forth in the sequence listing. A plant and/or plant tissue produced from the plant cell has a difference in the level of oxidative stress tolerance as compared to the corresponding level in a control plant that does not comprise the exogenous nucleic acid.

[0020] Methods of modulating the level of oxidative stress tolerance in a plant are provided herein. In one aspect, a method comprises introducing into a plant cell an exogenous nucleic acid, that comprises a regulatory region operably linked to a nucleotide sequence encoding a polypeptide. The HMM bit score of the amino acid sequence of the polypeptide is greater than 30, using an HMM generated from the amino acid sequences depicted in one of FIGS. 3, 5 and 8. A plant and/or plant tissue produced from the plant cell has a difference in the level of tolerance to oxidative stress as compared to the corresponding level in a control plant that does not comprise the exogenous nucleic acid.

[0021] In another aspect, a method comprises introducing into a plant cell an exogenous nucleic acid that comprises a regulatory region operably linked to a nucleotide sequence encoding a polypeptide having 85% percent or greater sequence identity to an amino acid sequence set forth in SEQ ID NOs: 79, 80, 82, 83, 84, 85, 87, 88, 89, 90, 91, 94, 96, 97, 98, 99, 100, 102, 104, 105, 107, 109, 110, 111, 112, 114, 116, 117, 118, 119, 120, 122, 124, 126, 127, 128, 130, 131, 132, 134, 135, 137, 139, 140, 141, 142, 143, 144, 145, 146, 147, 148, 150, 151, 152, 153, 155, 157, 158, 160, 161, 162, 163, 165, 167, 168, 169, 170, 171, 173, 175, 176, 178, 180, 181, 182, 183, 184, 186, 188, 190, 192, 194, 195, 197, 199, 201, 203, 205, 207, 208, 209, 211, 213, 215, 217, 219, 220, 221, 222, 223, 225, 227, 229, 230, 231, 232, 233, 235, 237, 238, 239, 240, 241, 242, 244, 245, 246, 247, 248, 249, 251, 252, 253, 255, 256, 258, 260, 261, 263, 264, 266, 267, 269, 270, 271, 272, 273, 274, 275, 277, 279, 281, 282, 284, 286, 288, 289, 290, 291, 293, 295, 296, 297, 299, 300, 301, 302, 304, 306, 308, 309, 311, 312, 313, 314, 315, 316, 318, 319, 321, 322, 324, 326, 328, 329, 330, 331, 332, 333, 335, 336, 337, 339, 341, 343, 345, 347, 349, 351, 352, 353, 354, 356 and 357. A plant and/or plant tissue produced from the plant cell has a difference in the level of tolerance to oxidative stress as compared to the corresponding level in a control plant that does not comprise the exogenous nucleic acid.

[0022] In some embodiments, the methods comprise introducing into the plant cell an exogenous nucleic acid encoding polypeptides selected from the group consisting of SEQ ID NOs: 79, 94, 102 and 107. A plant and/or plant tissue produced from the plant cell has a difference in the level of tolerance to oxidative stress as compared to the corresponding level in a control plant that does not comprise the exogenous nucleic acid.

[0023] In another aspect, a method comprises introducing into a plant cell an exogenous nucleic acid, that comprises a regulatory region operably linked to a nucleotide sequence having 85 percent or greater sequence identity to a nucleotide sequence set forth in SEQ ID NOs: 78, 81, 86, 92, 93, 95, 101, 103, 106, 108, 113, 115, 121, 123, 125, 129, 133, 136, 138, 149, 154, 156, 159, 164, 166, 172, 174, 177, 179, 185, 187, 189, 191, 193, 196, 198, 200, 202, 204, 206, 210, 212, 214, 216, 218, 224, 226, 228, 234, 236, 243, 250, 254, 257, 259, 262, 265, 268, 276, 278, 280, 283, 285, 287, 292, 294, 298, 303, 305, 307, 310, 317, 320, 323, 325, 327, 334, 338, 340, 342, 344, 346, 348, 350 and 355 and to a nucleotide sequence encoding any of the amino acid sequences set forth in the sequence listing. A plant and/or plant tissue produced from the plant cell has a difference in the level of tolerance to oxidative stress as compared to the corresponding level in a control plant that does not comprise the exogenous nucleic acid.

[0024] Plant cells comprising an exogenous nucleic acid are provided herein. In one aspect, the exogenous nucleic acid comprises a regulatory region operably linked to a nucleotide sequence encoding a polypeptide. The HMM bit score of the amino acid sequence of the polypeptide is greater than 30, using an HMM based on the amino acid sequences depicted in one of FIGS. 3, 5 and 8. The plant and/or plant tissue has a difference in the level of tolerance to oxidative stress as compared to the corresponding level in a control plant that does not comprise the exogenous nucleic acid. In another aspect, the exogenous nucleic acid comprises a regulatory region operably linked to a nucleotide sequence encoding a polypeptide having 85 percent or greater sequence identity to an amino acid sequence selected from the group consisting of SEQ ID NOs: 79, 80, 82, 83, 84, 85, 87, 88, 89, 90, 91, 94, 96, 97, 98, 99, 100, 102, 104, 105, 107, 109, 110, 111, 112, 114, 116, 117, 118, 119, 120, 122, 124, 126, 127, 128, 130, 131, 132, 134, 135, 137, 139, 140, 141, 142, 143, 144, 145, 146, 147, 148, 150, 151, 152, 153, 155, 157, 158, 160, 161, 162, 163, 165, 167, 168, 169, 170, 171, 173, 175, 176, 178, 180, 181, 182, 183, 184, 186, 188, 190, 192, 194, 195, 197, 199, 201, 203, 205, 207, 208, 209, 211, 213, 215, 217, 219, 220, 221, 222, 223, 225, 227, 229, 230, 231, 232, 233, 235, 237, 238, 239, 240, 241, 242, 244, 245, 246, 247, 248, 249, 251, 252, 253, 255, 256, 258, 260, 261, 263, 264, 266, 267, 269, 270, 271, 272, 273, 274, 275, 277, 279, 281, 282, 284, 286, 288, 289, 290, 291, 293, 295, 296, 297, 299, 300, 301, 302, 304, 306, 308, 309, 311, 312, 313, 314, 315, 316, 318, 319, 321, 322, 324, 326, 328, 329, 330, 331, 332, 333, 335, 336, 337, 339, 341, 343, 345, 347, 349, 351, 352, 353, 354, 356 and 357. A plant and/or plant tissue produced from the plant cell has a difference in the level of tolerance to oxidative stress as compared to the corresponding level in a control plant that does not comprise the exogenous nucleic acid. In another aspect, the exogenous nucleic acid comprises a regulatory region operably linked to a nucleotide sequence having 85 percent or greater sequence identity to at least a fragment of a nucleotide sequence selected from the group consisting of SEQ ID Nos. 78, 81, 86, 92, 93, 95, 101, 103, 106, 108, 113, 115, 121, 123, 125, 129, 133, 136, 138, 149, 154, 156, 159, 164, 166, 172, 174, 177, 179, 185, 187, 189, 191, 193, 196, 198, 200, 202, 204, 206, 210, 212, 214, 216, 218, 224, 226, 228, 234, 236, 243, 250, 254, 257, 259, 262, 265, 268, 276, 278, 280, 283, 285, 287, 292, 294, 298, 303, 305, 307, 310, 317, 320, 323, 325, 327, 334, 338, 340, 342, 344, 346, 348, 350 and 355, and to a nucleotide sequence encoding any of the amino acid sequences set forth in the sequence listing. A plant and/or plant tissue produced from the plant cell has a difference in the level of tolerance to oxidative stress as compared to the corresponding level in a control plant that does not comprise the exogenous nucleic acid. A transgenic plant comprising such a plant cell is also provided. In some embodiments, the transgenic plant is a member of a species selected from the group consisting of Panicum virgatum(switchgrass), Sorghum bicolor (sorghum, sudangrass), Miscanthus giganteus (miscanthus), Saccharum sp. (energycane), Populus balsamifera (poplar), Zea mays (corn), Glycine max (soybean), Brassica napus (canola), Triticum aestivum (wheat), Gossypium hirsutum (cotton), Oryza sativa (rice), Helianthus annuus (sunflower), Medicago sativa (alfalfa), Beta vulgaris (sugarbeet), or Pennisetum glaucum (pearl millet). Some embodiments are related to products comprising seed or vegetative tissue from transgenic plants as described above. Some embodiments relate to food or feed products from transgenic plants as described above.

[0025] In another aspect, an isolated nucleic acid comprises a nucleotide sequence encoding a polypeptide having 80% or greater sequence identity to the amino acid sequence set forth in SEQ ID Nos. 79, 94, 102 or 107.

[0026] In another aspect, methods of identifying a genetic polymorphism associated with variation in the level of oxidative stress tolerance are provided. The methods include providing a population of plants, and determining whether one or more genetic polymorphisms in the population are genetically linked to the locus for a polypeptide selected from the group consisting of the polypeptides depicted in FIGS. 3, 5, 8, or SEQ ID NO: 107 and functional homologs thereof. The correlation between variation in the level of oxidative stress tolerance in plants and/or plant tissues of the population and the presence of the one or more polymorphisms in plants of the population is measured, thereby permitting identification of whether or not the one or more polymorphisms are associated with such variation.

[0027] In another aspect, methods of making a plant line are provided. The methods include determining whether one or more genetic polymorphisms in a population of plants is associated with the locus for a polypeptide selected from the group consisting of the polypeptides depicted in FIGS. 3, 5, 8, or SEQ ID NO: 107 and functional homologs thereof, identifying one or more plants in the population in which the presence of at least one allele at the one or more polymorphisms is associated with variation in oxidative stress tolerance, crossing each of the one or more identified plants with itself or a different plant to produce seed, crossing at least one progeny plant grown from said seed with itself or a different plant, and repeating the crossing steps for an additional 0-5 generations to make the plant line. The at least one allele will be present in the plant line. The method of making a plant line may be applied, for example, to a population of switchgrass plants.

[0028] Unless otherwise defined, all technical and scientific terms used herein have the same meaning as commonly understood by one of ordinary skill in the art to which this invention pertains. Although methods and materials similar or equivalent to those described herein can be used to practice the invention, suitable methods and materials are described below. All publications, patent applications, patents, and other references mentioned herein are incorporated by reference in their entirety. In case of conflict, the present specification, including definitions, will control. In addition, the materials, methods, and examples are illustrative only and not intended to be limiting.

[0029] The details of one or more embodiments of the invention are set forth in the accompanying drawings and the description below. Other features, objects, and advantages of the invention will be apparent from the description and drawings, and from the claims.

### BRIEF DESCRIPTION OF THE FIGURES

[0030] FIG. 1. Growth of six independent transgenic events of ME02077; T₂ generation transgenic and non-transgenic plants grown under salicylic acid stress conditions.

[0031] FIG. 2. Growth of two selected transgenic events of ME02077; T₂ and T₃ generation transgenic and non-transgenic plants grown under salicylic acid stress conditions.

[0032] FIG. 3. Amino acid sequence alignment of homologues of ME02077 (SEQ ID NO: 79). Conserved regions are enclosed in a box.

[0033] FIG. 4. Growth of two selected transgenic events of ME06123; transgenic and non-transgenic plants in two consecutive generations grown under salicylic acid stress conditions.

[0034] FIG. 5. Amino acid sequence alignment of homologues of ME06123 (SEQ ID NO: 94). Conserved regions are enclosed in a box.

[0035] FIG. 6. Growth of three selected transgenic events of ME00922; T₂ and T₃ generation transgenic and non-transgenic plants grown under L-arginine stress conditions.

[0036] FIG. 7. Growth of two selected transgenic events of ME00922; T₃ generation transgenic and non-transgenic plants grown under L-arginine and SNP stress conditions.

[0037] FIG. 8. Amino acid sequence alignment of homologues of ME00922 (SEQ ID NO: 102). Conserved regions are enclosed in a box.

[0038] FIG. 9. Growth of three transgenic events of ME12485; T₂ and T₃ generation transgenic and non-transgenic plants grown under salicylic acid stress conditions.

### DETAILED DESCRIPTION

[0039] The invention features methods and materials related to modulating oxidative stress tolerance levels in plants and/or plant tissues. In some embodiments, the plants may also have increased biomass and/or yield. The methods can include transforming a plant cell with a nucleic acid encoding an oxidative stress tolerance-modulating polypeptide, wherein expression of the polypeptide results in a modulated level of oxidative stress tolerance. Plant cells produced using such methods can be grown to produce plants having an increased oxidative stress tolerance, and/or biomass, in comparison to wild type plants grown under the same conditions. Such plants, and the seeds of such plants, may be used to produce, for example, yield and/or biomass utilized for biofuel production, such as, but not limited to, ethanol and butanol.

### I. DEFINITIONS

[0040] “Amino acid” refers to one of the twenty biologically occurring amino acids and to synthetic amino acids, including D/L optical isomers.

[0041] “Cell type-preferential promoter” or “tissue-preferential promoter” refers to a promoter that drives expression preferentially in a target cell type or tissue, respectively, but may also lead to some transcription in other cell types or tissues as well.

[0042] “Control plant” refers to a plant that does not contain the exogenous nucleic acid present in a transgenic plant of interest, but otherwise has the same or similar genetic background as such a transgenic plant. A suitable control plant can be a non-transgenic wild type plant, a non-transgenic segregant from a transformation experiment, or a transgenic plant that contains an exogenous nucleic acid other than the exogenous nucleic acid of interest.

[0043] “Domains” are groups of substantially contiguous amino acids in a polypeptide that can be used to characterize protein families and/or parts of proteins. Such domains have a “fingerprint” or “signature” that can comprise conserved primary sequence, secondary structure, and/or three-dimensional conformation. Generally, domains are correlated with specific in vitro and/or in vivo activities. A domain can have a length of from 10 amino acids to 400 amino acids, e.g., 10 to 50 amino acids, or 25 to 100 amino acids, or 35 to 65 amino acids, or 35 to 55 amino acids, or 45 to 60 amino acids, or 200 to 300 amino acids, or 300 to 400 amino acids.

[0044] “Down-regulation” refers to regulation that decreases production of expression products (mRNA, polypeptide, or both) relative to basal or native states.

[0045] “Exogenous” with respect to a nucleic acid indicates that the nucleic acid is part of a recombinant nucleic acid construct, or is not in its natural environment. For example, an exogenous nucleic acid can be a sequence from one species introduced into another species, i.e., a heterologous nucleic acid. Typically, such an exogenous nucleic acid is introduced into the other species via a recombinant nucleic acid construct. An exogenous nucleic acid can also be a sequence that is native to an organism and that has been reintroduced into cells of that organism. An exogenous nucleic acid that includes a native sequence can often be distinguished from the naturally occurring sequence by the presence of non-natural sequences linked to the exogenous nucleic acid, e.g., non-native regulatory sequences flanking a native sequence in a recombinant nucleic acid construct. In addition, stably transformed exogenous nucleic acids typically are integrated at positions other than the position where the native sequence is found. It will be appreciated that an exogenous nucleic acid may have been introduced into a progenitor and not into the cell under consideration. For example, a transgenic plant containing an exogenous nucleic acid can be the progeny of a cross between a stably transformed plant and a non-transgenic plant. Such progeny are considered to contain the exogenous nucleic acid.

[0046] “Expression” refers to the process of converting genetic information of a polynucleotide into RNA through transcription, which is catalyzed by an enzyme, RNA polymerase, and into protein, through translation of mRNA on ribosomes.

[0047] “Heterologous polypeptide” as used herein refers to a polypeptide that is not a naturally occurring polypeptide in a plant cell, e.g., a transgenic Panicum virgatum plant transformed with and expressing the coding sequence for a nitrogen transporter polypeptide from a Zea mays plant.

[0048] “Isolated nucleic acid” as used herein includes a naturally-occurring nucleic acid, provided one or both of the sequences immediately flanking that nucleic acid in its naturally-occurring genome is removed or absent. Thus, an isolated nucleic acid includes, without limitation, a nucleic acid that exists as a purified molecule or a nucleic acid molecule that is incorporated into a vector or a virus. A nucleic acid existing among hundreds to millions of other nucleic acids within, for example, cDNA libraries, genomic libraries, or gel slices containing a genomic DNA restriction digest, is not to be considered an isolated nucleic acid.

[0049] “Modulation” of the level of a compound or constituent refers to the change in the level of the indicated compound or constituent that is observed as a result of expression of, or transcription from, an exogenous nucleic acid in a plant cell. The change in level is measured relative to the corresponding level in control plants.

[0050] “Nucleic acid” and “polynucleotide” are used interchangeably herein, and refer to both RNA and DNA, including cDNA, genomic DNA, synthetic DNA, and DNA or RNA containing nucleic acid analogs. Polynucleotides can have any three-dimensional structure. A nucleic acid can be double-stranded or single-stranded (i.e., a sense strand or an antisense strand). Non-limiting examples of polynucleotides include genes, gene fragments, exons, introns, messenger RNA (mRNA), transfer RNA, ribosomal RNA, siRNA, micro-RNA, ribozymes, cDNA, recombinant polynucleotides, branched polynucleotides, nucleic acid probes and nucleic acid primers. A polynucleotide may contain unconventional or modified nucleotides.

[0051] “Operably linked” refers to the positioning of a regulatory region and a sequence to be transcribed in a nucleic acid so that the regulatory region is effective for regulating transcription or translation of the sequence. For example, to operably link a coding sequence and a regulatory region, the translation initiation site of the translational reading frame of the coding sequence is typically positioned between one and about fifty nucleotides downstream of the regulatory region. A regulatory region can, however, be positioned as much as about 5,000 nucleotides upstream of the translation initiation site, or about 2,000 nucleotides upstream of the transcription start site.

[0052] “Polypeptide” as used herein refers to a compound of two or more subunit amino acids, amino acid analogs, or other peptidomimetics, regardless of post-translational modification, e.g., phosphorylation or glycosylation. The subunits may be linked by peptide bonds or other bonds such as, for example, ester or ether bonds. Full-length polypeptides, truncated polypeptides, point mutants, insertion mutants, splice variants, chimeric proteins, and fragments thereof are encompassed by this definition.

[0053] “Progeny” includes descendants of a particular plant or plant line. Progeny of an instant plant include seeds formed on F₁, F₂, F₃, F₄, F₅, F₆ and subsequent generation plants, or seeds formed on BC₁, BC₂, BC₃, and subsequent generation plants, or seeds formed on F₁BC₁, F₁BC₂, F₁BC₃, and subsequent generation plants. The designation F₁ refers to the progeny of a cross between two parents that are genetically distinct. The designations F₂, F₃, F₄, F₅ and F₆ refer to subsequent generations of self- or sib-pollinated progeny of an F₁ plant.

[0054] “Regulatory region” refers to a nucleic acid having nucleotide sequences that influence transcription or translation initiation and rate, and stability and/or mobility of a transcription or translation product. Regulatory regions include, without limitation, promoter sequences, enhancer sequences, response elements, protein recognition sites, inducible elements, protein binding sequences, 5′ and 3′ untranslated regions (UTRs), transcriptional start sites, termination sequences, polyadenylation sequences, introns, and combinations thereof. A regulatory region typically comprises at least a core (basal) promoter. A regulatory region also may include at least one control element, such as an enhancer sequence, an upstream element or an upstream activation region (UAR). For example, a suitable enhancer is a cis-regulatory element (−212 to −154) from the upstream region of the octopine synthase (ocs) gene. Fromm et al., The Plant Cell, 1:977-984 (1989).

[0055] “Up-regulation” refers to regulation that increases the level of an expression product (mRNA, polypeptide, or both) relative to basal or native states.

[0056] “Vector” refers to a replicon, such as a plasmid, phage, or cosmid, into which another DNA segment may be inserted so as to bring about the replication of the inserted segment. Generally, a vector is capable of replication when associated with the proper control elements. The term “vector” includes cloning and expression vectors, as well as viral vectors and integrating vectors. An “expression vector” is a vector that includes a regulatory region.

[0057] Oxidative stress: Plant species vary in their capacity to tolerate ROS/ROI/AOS. “Oxidative stress” can be defined as the set of environmental conditions under which a plant will begin to suffer the effects of elevated ROS/ROI/AOS concentration, such as decreases in enzymatic activity, DNA breakage, DNA-protein crosslinking, necrosis and stunted growth. For these reasons, plants experiencing oxidative stress typically exhibit a significant reduction in biomass and/or yield.

[0058] Elevated oxidative stress may be caused by natural, geological processes and by human activities, such as pollution. Since plant species vary in their capacity to tolerate oxidative stress, the precise environmental conditions that cause stress cannot be generalized. However, under oxidative stress conditions, oxidative stress tolerant plants produce higher biomass, yield and survivorship than plants that are not oxidative stress tolerant. Differences in physical appearance, recovery and yield can be quantified

[0059] Photosynthetic efficiency: photosynthetic efficiency, or electron transport via photosystem II, is estimated by the relationship between Fm, the maximum fluorescence signal and the variable fluorescence, Fv. A reduction in the optimum quantum yield (Fv/Fm) indicates stress and can be used to monitor the performance of transgenic plants compared to non-transgenic plants under oxidative stress conditions.

[0060] Salicylic Acid Growth Index (SAGI): Photosynthetic efficiency×seedling area.

### II. POLYPEPTIDES

[0061] Polypeptides described herein include oxidative stress tolerance-modulating polypeptides. Oxidative stress tolerance-modulating polypeptides can be effective to modulate oxidative stress tolerance levels when expressed in a plant or plant cell. Such polypeptides typically contain at least one domain indicative of oxidative stress tolerance-modulating polypeptides, as described in more detail herein. Oxidative stress tolerance-modulating polypeptides typically have an HMM bit score that is greater than 30, as described in more detail herein. In some embodiments, oxidative stress tolerance-modulating polypeptides have greater than 85% identity to SEQ ID NOs: 79, 80, 82, 83, 84, 85, 87, 88, 89, 90, 91, 94, 96, 97, 98, 99, 100, 102, 104, 105, 107, 109, 110, 111, 112, 114, 116, 117, 118, 119, 120, 122, 124, 126, 127, 128, 130, 131, 132, 134, 135, 137, 139, 140, 141, 142, 143, 144, 145, 146, 147, 148, 150, 151, 152, 153, 155, 157, 158, 160, 161, 162, 163, 165, 167, 168, 169, 170, 171, 173, 175, 176, 178, 180, 181, 182, 183, 184, 186, 188, 190, 192, 194, 195, 197, 199, 201, 203, 205, 207, 208, 209, 211, 213, 215, 217, 219, 220, 221, 222, 223, 225, 227, 229, 230, 231, 232, 233, 235, 237, 238, 239, 240, 241, 242, 244, 245, 246, 247, 248, 249, 251, 252, 253, 255, 256, 258, 260, 261, 263, 264, 266, 267, 269, 270, 271, 272, 273, 274, 275, 277, 279, 281, 282, 284, 286, 288, 289, 290, 291, 293, 295, 296, 297, 299, 300, 301, 302, 304, 306, 308, 309, 311, 312, 313, 314, 315, 316, 318, 319, 321, 322, 324, 326, 328, 329, 330, 331, 332, 333, 335, 336, 337, 339, 341, 343, 345, 347, 349, 351, 352, 353, 354, 356 and 357 as described in more detail herein.

[0062] A. Domains Indicative of Oxidative Stress Tolerance-Modulating Polypeptides

[0063] An oxidative stress tolerance-modulating polypeptide can contain an AP2 domain, which is predicted to be characteristic of an oxidative stress tolerance-modulating polypeptide. These polypeptides typically bind to the GCC-box pathogenesis-related promoter element and activates the plant's defense genes. Ethylene, chemically the simplest plant hormone, participates in a number of stress responses and developmental processes: e.g., fruit ripening, inhibition of stem and root elongation, promotion of seed germination and flowering, senescence of leaves and flowers, and sex determination. DNA sequence elements that confer ethylene responsiveness have been shown to contain two 11 bp GCC boxes, which are necessary and sufficient for transcriptional control by ethylene. Ethylene responsive element binding proteins (EREBPs) have now been identified in a variety of plants. The proteins share a similar domain of around 59 amino acids, which interacts directly with the GCC box in the ERE (see e.g. PUBMED:7732375). For example, SEQ ID NOs: 79, 80, 82, 83, 84, 85, 87, 88, 89, 90, 91, 128, 130, 131, 132, 134, 135, 137, 139, 140, 141, 142, 143, 144, 145, 146, 147, 148, 150, 151, 152, 153, 155, 157, 158, 160, 161, 162, 163, 165, 167, 168, 169, 170, 171, 173, 175, 176, 178, 180, 181, 182, 183, 184, 186, 188, 190, 192, 194, 195, 197, 199, 201, 203, 205, 207, 208, 209, 211, 213, 215, 217, 219, 220, 221, 222, 223, 225, 227, 229, 230, 231, 232, 233, 235, 237, 238, 239, 240, 241, 242, 244, 245, 246, 247, and 248 exemplify polypeptide sequences having AP2 domains.

[0064] An oxidative stress tolerance-modulating polypeptide can contain a transmembrane amino acid transporter protein domain, which is predicted to be characteristic of an oxidative stress tolerance-modulating polypeptide. For example, SEQ ID NOs: 94, 96, 97, 98, 99, 100, 249, 251, 252, 253, 255, 255, 256, 258, 260, 261, 263, 263, 264, 266, 266, 267, 269, 270, 271, 272, 273, 274, 275, 277, 279, 281, 282, 284, 286, 286, 288, 289, 290, 291, 291, 293, 295, 296, 297, 299, 300, 301, 302, 304, 304, 306, 308, 309, 311, 312, 313, 314, 315, 316, 318, 319, 321, 322, 324, 326, 328, 329, 330, 331, 332, 333, 335, 336, 337, 339, 341, 343, 345, 347, 349, 351, 352, and 353 exemplify polypeptide sequences having transmembrane amino acid transporter protein domains.

[0065] An oxidative stress tolerance-modulating polypeptide can contain a Rubisco LSMT substrate-binding domain, which is predicted to be characteristic of an oxidative stress tolerance-modulating polypeptide. Members of this family adopt a multihelical structure, with an irregular array of long and short alpha-helices. They allow binding of the protein to substrate, such as the N-terminal tails of histones H3 and H4 and the large subunit of the Rubisco holoenzyme complex. For example, SEQ ID NOs: 102, 104, 105, 109, 110, 111, 112, 114, 116, 117, 118, 119, 120, 122, and 124 exemplify polypeptide sequences having Rubisco LSMT substrate-binding domains.

[0066] An oxidative stress tolerance-modulating polypeptide can contain a SET domain, which is predicted to be characteristic of an oxidative stress tolerance-modulating polypeptide. SET domains are protein lysine methyltransferase enzymes. SET domains appear to be protein-protein interaction domains. SET domains sometimes mediate interactions with a family of proteins that display similarity with dual-specificity phosphatases. The SET domain consists of two regions known as SET-N and SET-C. SET-C forms an unusual and conserved knot-like structure of probably functional importance. Additionally to SET-N and SET-C, an insert region (SET-I) and flanking regions of high structural variability form part of the overall structure. For example, SEQ ID NOs: 102, 104, 105, 109, 110, 111, 112, 114, 116, 117, 118, 119, 120, 122, 124, 126, and 127 exemplify polypeptide sequences having SET domains.

[0067] In some embodiments, an oxidative stress tolerance-modulating polypeptide is truncated at the amino- or carboxy-terminal end of a naturally occurring polypeptide. A truncated polypeptide may retain certain domains of the naturally occurring polypeptide while lacking others. Thus, length variants that are up to 5 amino acids shorter or longer typically exhibit the salinity tolerance and/or oxidative stress tolerance-modulating activity of a truncated polypeptide. Expression in a plant of such a truncated polypeptide confers a difference in the level of oxidative stress tolerance in a plant and/or plant tissue as compared to the corresponding level a control plant and/or tissue thereof that does not comprise the truncation.

[0068] B. Functional Homologs Identified by Reciprocal BLAST

[0069] In some embodiments, one or more functional homologs of a reference oxidative stress tolerance-modulating polypeptide defined by one or more of the pfam descriptions indicated above are suitable for use as oxidative stress tolerance-modulating polypeptides. A functional homolog is a polypeptide that has sequence similarity to a reference polypeptide, and that carries out one or more of the biochemical or physiological function(s) of the reference polypeptide. A functional homolog and the reference polypeptide may be natural occurring polypeptides, and the sequence similarity may be due to convergent or divergent evolutionary events. As such, functional homologs are sometimes designated in the literature as homologs, or orthologs, or paralogs. Variants of a naturally occurring functional homolog, such as polypeptides encoded by mutants of a wild type coding sequence, may themselves be functional homologs. Functional homologs can also be created via site-directed mutagenesis of the coding sequence for an oxidative stress tolerance-modulating polypeptide, or by combining domains from the coding sequences for different naturally-occurring oxidative stress tolerance-modulating polypeptides (“domain swapping”). The term “functional homolog” is sometimes applied to the nucleic acid that encodes a functionally homologous polypeptide.

[0070] Functional homologs can be identified by analysis of nucleotide and polypeptide sequence alignments. For example, performing a query on a database of nucleotide or polypeptide sequences can identify homologs of oxidative stress tolerance-modulating polypeptides. Sequence analysis can involve BLAST, Reciprocal BLAST, or PSI-BLAST analysis of nonredundant databases using an oxidative stress tolerance-modulating polypeptide amino acid sequence as the reference sequence. Amino acid sequence is, in some instances, deduced from the nucleotide sequence. Those polypeptides in the database that have greater than 40% sequence identity are candidates for further evaluation for suitability as an oxidative stress tolerance-modulating polypeptide. Amino acid sequence similarity allows for conservative amino acid substitutions, such as substitution of one hydrophobic residue for another or substitution of one polar residue for another. If desired, manual inspection of such candidates can be carried out in order to narrow the number of candidates to be further evaluated. Manual inspection can be performed by selecting those candidates that appear to have domains present in oxidative stress tolerance-modulating polypeptides, e.g., conserved functional domains.

[0071] Conserved regions can be identified by locating a region within the primary amino acid sequence of an oxidative stress tolerance-modulating polypeptide that is a repeated sequence, forms some secondary structure (e.g., helices and beta sheets), establishes positively or negatively charged domains, or represents a protein motif or domain. See, e.g., the Pfam web site describing consensus sequences for a variety of protein motifs and domains on the World Wide Web at sanger.ac.uk/Software/Pfam/ and pfam.janelia.org/. A description of the information included at the Pfam database is described in Sonnhammer et al., Nucl. Acids Res., 26:320-322 (1998); Sonnhammer et al., Proteins, 28:405-420 (1997); and Bateman et al., Nucl. Acids Res., 27:260-262 (1999). Conserved regions also can be determined by aligning sequences of the same or related polypeptides from closely related species. Closely related species preferably are from the same family. In some embodiments, alignment of sequences from two different species is adequate.

[0072] Typically, polypeptides that exhibit at least about 40% amino acid sequence identity are useful to identify conserved regions. Conserved regions of related polypeptides exhibit at least 45% amino acid sequence identity (e.g., at least 50%, at least 60%, at least 70%, at least 80%, or at least 90% amino acid sequence identity). In some embodiments, a conserved region exhibits at least 92%, 94%, 96%, 98%, or 99% amino acid sequence identity.

[0073] Amino acid sequences of functional homologs of the polypeptide set forth in SEQ ID NO: 79 are provided in FIG. 3 and in the Sequence Listing. Such functional homologs include SEQ ID NO: 80, 82, 83, 84, 85, 87, 88, 89, 90, 91, 128, 130, 131, 132, 134, 135, 137, 139, 140, 141, 142, 143, 144, 145, 146, 147, 148, 150, 151, 152, 153, 155, 157, 158, 160, 161, 162, 163, 165, 167, 168, 169, 170, 171, 173, 175, 176, 178, 180, 181, 182, 183, 184, 186, 188, 190, 192, 194, 195, 197, 199, 201, 203, 205, 207, 208, 209, 211, 213, 215, 217, 219, 220, 221, 222, 223, 225, 227, 229, 230, 231, 232, 233, 235, 237, 238, 239, 240, 241, 242, 244, 245, 246, 247 and 248. In some cases, a functional homolog of SEQ ID NO: 79 has an amino acid sequence with at least 50% sequence identity, e.g., 50%, 52%, 56%, 59%, 61%, 65%, 70%, 75%, 80%, 85%, 90%, 95%, 97%, 98%, or 99% sequence identity, to the amino acid sequence set forth in SEQ ID NO: 79.

[0074] Amino acid sequences of functional homologs of the polypeptide set forth in SEQ ID NO: 94 are provided in FIG. 5. Such functional homologs include SEQ ID NO: 96, 97, 98, 99, 100, 249, 251, 252, 253, 255, 256, 258, 260, 261, 263, 264, 266, 267, 269, 270, 271, 272, 273, 274, 275, 277, 279, 281, 282, 284, 286, 288, 289, 290, 291, 293, 295, 296, 297, 299, 300, 301, 302, 304, 306, 308, 309, 311, 312, 313, 314, 315, 316, 318, 319, 321, 322, 324, 326, 328, 329, 330, 331, 332, 333, 335, 336, 337, 339, 341, 343, 345, 347, 349, 351, 352 and 353. In some cases, a functional homolog of SEQ ID NO: 94 has an amino acid sequence with at least 50% sequence identity, e.g., 50%, 52%, 56%, 59%, 61%, 65%, 70%, 75%, 80%, 85%, 90%, 95%, 97%, 98%, or 99% sequence identity, to the amino acid sequence set forth in SEQ ID NO: 94.

[0075] Amino acid sequences of functional homologs of the polypeptide set forth in SEQ ID NO: 102 are provided in FIG. 8. Such functional homologs include SEQ ID NO: 104, 105, 109, 110, 111, 112, 114, 116, 117, 118, 119, 120, 122, 124, 126 and 127. In some cases, a functional homolog of SEQ ID NO: 102 has an amino acid sequence with at least 50% sequence identity, e.g., 50%, 52%, 56%, 59%, 61%, 65%, 70%, 75%, 80%, 85%, 90%, 95%, 97%, 98%, or 99% sequence identity, to the amino acid sequence set forth in SEQ ID NO: 102.

[0076] Amino acid sequences of functional homologs of the polypeptide set forth in SEQ ID NO:107 are provided in the Sequence Listing. Such functional homologs include SEQ ID NO: 354, 356 and 357). In some cases, a functional homolog of SEQ ID NO: 107 has an amino acid sequence with at least 50% sequence identity, e.g., 50%, 52%, 56%, 59%, 61%, 65%, 70%, 75%, 80%, 85%, 90%, 95%, 97%, 98%, or 99% sequence identity, to the amino acid sequence set forth in SEQ ID NO: 107.

[0077] The identification of conserved regions in an oxidative stress tolerance-modulating polypeptide facilitates production of variants of oxidative stress tolerance-modulating polypeptides. Variants of oxidative stress tolerance-modulating polypeptides typically have 10 or fewer conservative amino acid substitutions within the primary amino acid sequence, e.g., 7 or fewer conservative amino acid substitutions, 5 or fewer conservative amino acid substitutions, or between 1 and 5 conservative substitutions. A useful variant polypeptide can be constructed based on one of the alignments set forth in FIGS. 3, 5 and 8. Such a polypeptide includes the conserved regions, arranged in the order depicted in the Figure from amino-terminal end to carboxy-terminal end. Such a polypeptide may also include zero, one, or more than one amino acid in positions marked by dashes. When no amino acids are present at positions marked by dashes, the length of such a polypeptide is the sum of the amino acid residues in all conserved regions. When amino acids are present at all positions marked by dashes, such a polypeptide has a length that is the sum of the amino acid residues in all conserved regions and all dashes.

[0078] C. Functional Homologues Identified by HMM

[0079] In some embodiments, useful oxidative stress tolerance-modulating polypeptides include those that fit a Hidden Markov Model based on the polypeptides set forth in any one of FIGS. 3, 5 and 8. A Hidden Markov Model (HMM) is a statistical model of a consensus sequence for a group of functional homologs. See, Durbin et al., Biological Sequence Analysis Probabilistic Models of Proteins and Nucleic Acids, Cambridge University Press, Cambridge, UK (1998). An HMM is generated by the program HMMER 2.3.2 with default program parameters, using the sequences of the group of functional homologs as input. The multiple sequence alignment is generated by ProbCons (Do et al., Genome Res., 15(2):330-40 (2005)) version 1.11 using a set of default parameters: -c, —consistency REPS of 2; -ir, —iterative-refinement REPS of 100; -pre, —pre-training REPS of 0. ProbCons is a public domain software program provided by Stanford University.

[0080] The default parameters for building an HMM (hmmbuild) are as follows: the default “architecture prior” (archpri) used by MAP architecture construction is 0.85, and the default cutoff threshold (idlevel) used to determine the effective sequence number is 0.62. HMMER 2.3.2 was released Oct. 3, 2003 under a GNU general public license, and is available from various sources on the World Wide Web. Hmmbuild outputs the model as a text file.

[0081] The HMM for a group of functional homologs can be used to determine the likelihood that a candidate oxidative stress tolerance-modulating polypeptide sequence is a better fit to that particular HMM than to a null HMM generated using a group of sequences that are not structurally or functionally related. The likelihood that a subject polypeptide sequence is a better fit to an HMM than to a null HMM is indicated by the HMM bit score, a number generated when the candidate sequence is fitted to the HMM profile using the HMMER hmmsearch program. The following default parameters are used when running hmmsearch: the default E-value cutoff (E) is 10.0, the default bit score cutoff (T) is negative infinity, the default number of sequences in a database (Z) is the real number of sequences in the database, the default E-value cutoff for the per-domain ranked hit list (domE) is infinity, and the default bit score cutoff for the per-domain ranked hit list (domT) is negative infinity. A high HMM bit score indicates a greater likelihood that the subject sequence carries out one or more of the biochemical or physiological function(s) of the polypeptides used to generate the HMM. A high HMM bit score is at least 20, and often is higher. Slight variations in the HMM bit score of a particular sequence can occur due to factors such as the order in which sequences are processed for alignment by multiple sequence alignment algorithms such as the ProbCons program. Nevertheless, such HMM bit score variation is minor.

[0082] As those of skill in the art would appreciate, the HMM scores provided in the sequence listing are merely exemplary. Since multiple sequence alignment algorithms, such as ProbCons, can only generate near-optimal results, slight variations of the model can arise due to factors such as the order in which sequences are processed for alignment. Nevertheless, HMM score variability is minor, and so the HMM scores in the sequence listing are representative of models made with the respective sequences.

[0083] The oxidative stress-modulating polypeptides discussed below fit the indicated HMM with an HMM bit score greater than 20 (e.g., greater than 20, 30, 40, 50, 60, 70, 80, 90, 100, 200, 300, 400, or 500). In some embodiments, the HMM bit score of a salinity and/or oxidative stress-modulating polypeptide discussed below is about 50%, 60%, 70%, 80%, 90%, or 95% of the HMM bit score of a functional homolog provided in the Sequence Listing. In some embodiments, an oxidative stress-modulating polypeptide discussed below fits the indicated HMM with an HMM bit score greater than 20, and has a domain indicative of an oxidative stress-modulating polypeptide. In some embodiments, an oxidative stress-modulating polypeptide discussed below fits the indicated HMM with an HMM bit score greater than 20, and has 85% or greater sequence identity (e.g., 75%, 80%, 85%, 90%, 95%, or 100% sequence identity) to an amino acid sequence shown in any one of FIGS. 3, 5 and 8 or to an amino acid sequence correlated in the Sequence Listing to a any one of FIGS. 3, 5 and 8.

[0084] In the Sequence Listing polypeptides are provided that have HMM bit scores greater than 40, 45, 50, 60, 70, 80, 90, 100, 150, 200, 250, 300, 400, 500, 550 600, 650, 700 or 725, when fitted to an HMM generated from the amino acid sequences set forth in FIG. 3. Such polypeptides include Ceres SEEDLINE ID no. ME02077, Public GI ID no. 89257562, Ceres CLONE ID no. 1725082, Public GI ID no. 92878368, Ceres CLONE ID no. 1661141, Public GI ID no. 92878365, Ceres CLONE ID no. 1894778, Public GI ID no. 50927523, Public GI ID no. 8809575, Public GI ID no. 1208497, Public GI ID no. 60459383, Ceres SEEDLINE ID no. ME02077, Ceres CLONE ID no. 1935323, Public GI ID no. 12003376, Public GI ID no. 8843855, Ceres CLONE ID no. 1850283, Public GI ID no. 34013890, Ceres CLONE ID no. 1428135, Ceres CLONE ID no. 1605871, Public GI ID no. 38260669, Public GI ID no. 38260631, Public GI ID no. 38260685, Public GI ID no. 14140143, Public GI ID no. 115447673, Public GI ID no. 125540543, Public GI ID no. 38260649, Public GI ID no. 38260618, Public GI ID no. 38196019, Ceres CLONE ID no. 540272, Public GI ID no. 7576196, Public GI ID no. 79508406, Public GI ID no. 32490143, Ceres CLONE ID no. 1335966, Ceres CLONE ID no. 998737, Public CLONE ID no. 10093608, Ceres ANNOT ID no. 1537977, Public GI ID no. 115459750, Public GI ID no. 125549239, Public GI ID no. 125549238, Ceres CLONE ID no. 927860, Ceres CLONE ID no. 68144, Public GI ID no. 21264420, Public GI ID no. 115493452, Public GI ID no. 7528276, Public GI ID no. 37730469, Ceres CLONE ID no. 907605, Ceres CLONE ID no. 582684, Public GI ID no. 28274834, Ceres CLONE ID no. 1926437, Ceres ANNOT ID no. 14477726, Public GI ID no. 115459748, Public GI ID no. 116310255, Public GI ID no. 125549236, Public GI ID no. 125591182, Ceres CLONE ID no. 1848864, Ceres CLONE ID no. 1807978, Ceres CLONE ID no. 1933466, Ceres CLONE ID no. 1834552, Ceres CLONE ID no. 1614474, Public GI ID no. 40060531, Ceres ANNOT ID no. 1438401, Ceres CLONE ID no. 1847074, Ceres CLONE ID no. 1855621, Ceres ANNOT ID no. 1484557, Ceres CLONE ID no. 1846882, Ceres CLONE ID no. 1854513, Public GI ID no. 18423250, Public GI ID no. 21592411, Ceres CLONE ID no. 2347, Ceres CLONE ID no. 1080500, Ceres CLONE ID no. 1849534, Ceres CLONE ID no. 965028, Ceres CLONE ID no. 464504, Public GI ID no. 12231294, Public GI ID no. 15240297, Public GI ID no. 13430474, Public GI ID no. 21617964, Ceres ANNOT ID no. 1438399, Ceres ANNOT ID no. 1484559, Ceres CLONE ID no. 548557, Public GI ID no. 18422770, Public GI ID no. 8809606, Public GI ID no. 89257455, Public GI ID no. 89257468, Ceres ANNOT ID no. 1486129, Ceres ANNOT ID no. 1446832, Public GI ID no. 40060533, Public GI ID no. 76097531, Public GI ID no. 60459379, Public GI ID no. 45642990, Public GI ID no. 3298498, Ceres CLONE ID no. 268310, Public GI ID no. 18414895, Public GI ID no. 17473792, Public GI ID no. 57012758 and Public GI ID no. 57012874 (SEQ ID NO: 79, 80, 82, 83, 84, 85, 87, 88, 89, 90, 91, 128, 130, 131, 132, 134, 135, 137, 139, 140, 141, 142, 143, 144, 145, 146, 147, 148, 150, 151, 152, 153, 155, 157, 158, 160, 161, 162, 163, 165, 167, 168, 169, 170, 171, 173, 175, 176, 178, 180, 181, 182, 183, 184, 186, 188, 190, 192, 194, 195, 197, 199, 201, 203, 205, 207, 208, 209, 211, 213, 215, 217, 219, 220, 221, 222, 223, 225, 227, 229, 230, 231, 232, 233, 235, 237, 238, 239, 240, 241, 242, 244, 245, 246, 247 and 248, respectively).

[0085] In the Sequence Listing polypeptides are provided that have HMM bit scores greater than 150, 200, 250, 300, 350, 400, 450, 500, 550, 600, 650, 700, 750, 800, 850, 900, 950, 1000, 1050, 1200, 1250, 1300, 1350 or 1400 when fitted to an HMM generated from the amino acid sequences set forth in FIG. 5. Such polypeptides include Ceres SEEDLINE ID no. ME06123, Ceres ANNOT ID no. 1450631, Ceres CLONE ID no. 1658212, Public GI ID no. 50927941, Ceres CLONE ID no. 383013, Ceres CLONE ID no. 788118, Public GI ID no. 92871428, Ceres ANNOT ID no. 1473784, Public GI ID no. 7239491, Public GI ID no. 92871429, Ceres ANNOT ID no. 1516369, Public GI ID no. 125548592, Ceres ANNOT ID no. 1517322, Ceres ANNOT ID no. 1459650, Public GI ID no. 125593423, Ceres CLONE ID no. 1796001, Public GI ID no. 115474609, Ceres CLONE ID no. 684177, Public GI ID no. 30409136, Ceres CLONE ID no. 195207, Public GI ID no. 125536241, Public GI ID no. 22330117, Public GI ID no. 12597815, Public GI ID no. 115488002, Public GI ID no. 125579355, Public GI ID no. 976402, Ceres ANNOT ID no. 1493584, Ceres CLONE ID no. 1571117, Ceres CLONE ID no. 786667, Public GI ID no. 15219896, Ceres CLONE ID no. 914964, Ceres ANNOT ID no. 1440705, Ceres CLONE ID no. 264227, Public GI ID no. 30693666, Public GI ID no. 30693663, Public GI ID no. 2443875, Ceres CLONE ID no. 1257761, Ceres CLONE ID no. 1109755, Public GI ID no. 15232176, Public GI ID no. 6091720, Ceres ANNOT ID no. 1512922, Public GI ID no. 15220504, Public GI ID no. 116830999, Public GI ID no. 18395471, Ceres ANNOT ID no. 1463076, Ceres CLONE ID no. 1904659, Ceres ANNOT ID no. 1458889, Public GI ID no. 15222615, Ceres ANNOT ID no. 1527205, Public GI ID no. 53749301, Public GI ID no. 115458804, Public GI ID no. 125590641, Public GI ID no. 2576361, Public GI ID no. 21593132, Ceres CLONE ID no. 36461, Public GI ID no. 4455344, Ceres ANNOT ID no. 1450630, Public GI ID no. 452593, Ceres ANNOT ID no. 1495347, Ceres ANNOT ID no. 1442446, Ceres CLONE ID no. 573806, Public GI ID no. 115459914, Public GI ID no. 116310155, Public GI ID no. 115488592, Public GI ID no. 15220283, Public GI ID no. 5688864, Ceres ANNOT ID no. 1539815, Public GI ID no. 125591283, Public GI ID no. 125549341, Ceres CLONE ID no. 833489, Ceres ANNOT ID no. 1450632, Ceres ANNOT ID no. 1460559, Ceres CLONE ID no. 1990904, Ceres ANNOT ID no. 1486399, Ceres CLONE ID no. 30044, Ceres CLONE ID no. 910080, Public GI ID no. 125536645 and Public PUBLICCLONE ID no. 10006534 (SEQ ID NO: 94, 96, 97, 98, 99, 100, 249, 251, 252, 253, 255, 256, 258, 260, 261, 263, 264, 266, 267, 269, 270, 271, 272, 273, 274, 275, 277, 279, 281, 282, 284, 286, 288, 289, 290, 291, 293, 295, 296, 297, 299, 300, 301, 302, 304, 306, 308, 309, 311, 312, 313, 314, 315, 316, 318, 319, 321, 322, 324, 326, 328, 329, 330, 331, 332, 333, 335, 336, 337, 339, 341, 343, 345, 347, 349, 351, 352 and 353, respectively).

[0086] In the Sequence Listing polypeptides are provided that have HMM bit scores greater than 100, 120, 150, 200, 250, 300, 350, 400, 450, 500, 550, 600, 650, 700, 750, 800, 850, 900, 950, 1000, 1050, 1100, 1150, 1200 or 1250 when fitted to an HMM generated from the amino acid sequences set forth in FIG. 8. Such polypeptides include Ceres SEEDLINE ID no. ME00922, Ceres ANNOT ID no. 1536088, Public GI ID no. 77554044, Ceres CLONE ID no. 479625, Public GI ID no. 22326803, Public GI ID no. 18377718, Public GI ID no. 7573451, Ceres CLONE ID no. 24159, Ceres ANNOT ID no. 1482610, Public GI ID no. 92872502, Public GI ID no. 115487958, Public GI ID no. 125536207, Public GI ID no. 125578929, Ceres CLONE ID no. 26560_ME22365, Ceres CLONE ID no. 463156, Ceres CLONE ID no. 1998672 and Public PUBLICCLONE ID no. 10092646 (SEQ ID NO: 102, 104, 105, 109, 110, 111, 112, 114, 116, 117, 118, 119, 120, 122, 124, 126 and 127, respectively).

[0087] D. Percent Identity

[0088] In some embodiments, an oxidative stress tolerance-modulating polypeptide has an amino acid sequence with at least 50% sequence identity, e.g., 50%, 52%, 56%, 59%, 61%, 65%, 70%, 75%, 80%, 85%, 90%, 95%, 97%, 98%, or 99% sequence identity, to one of the amino acid sequences set forth in SEQ ID NOs: 79, 80, 82, 83, 84, 85, 87, 88, 89, 90, 91, 94, 96, 97, 98, 99, 100, 102, 104, 105, 107, 109, 110, 111, 112, 114, 116, 117, 118, 119, 120, 122, 124, 126, 127, 128, 130, 131, 132, 134, 135, 137, 139, 140, 141, 142, 143, 144, 145, 146, 147, 148, 150, 151, 152, 153, 155, 157, 158, 160, 161, 162, 163, 165, 167, 168, 169, 170, 171, 173, 175, 176, 178, 180, 181, 182, 183, 184, 186, 188, 190, 192, 194, 195, 197, 199, 201, 203, 205, 207, 208, 209, 211, 213, 215, 217, 219, 220, 221, 222, 223, 225, 227, 229, 230, 231, 232, 233, 235, 237, 238, 239, 240, 241, 242, 244, 245, 246, 247, 248, 249, 251, 252, 253, 255, 256, 258, 260, 261, 263, 264, 266, 267, 269, 270, 271, 272, 273, 274, 275, 277, 279, 281, 282, 284, 286, 288, 289, 290, 291, 293, 295, 296, 297, 299, 300, 301, 302, 304, 306, 308, 309, 311, 312, 313, 314, 315, 316, 318, 319, 321, 322, 324, 326, 328, 329, 330, 331, 332, 333, 335, 336, 337, 339, 341, 343, 345, 347, 349, 351, 352, 353, 354, 356 and 357. Polypeptides having such a percent sequence identity often have a domain indicative of an oxidative stress-modulating polypeptide and/or have an HMM bit score that is greater than 20, as discussed above. Examples of amino acid sequences of oxidative stress tolerance-modulating polypeptides having at least 85% sequence identity to one of the amino acid sequences set forth in SEQ ID NOs: 79, 80, 83, 84, 89, 91, 94, 96, 97, 98, 99, 100, 102, 104, 105, 109 and 122, are provided in FIGS. 3, 5 and 8.

[0089] “Percent sequence identity” refers to the degree of sequence identity between any given reference sequence, e.g., SEQ ID NOs: 79, 80, 82, 83, 84, 85, 87, 88, 89, 90, 91, 94, 96, 97, 98, 99, 100, 102, 104, 105, 107, 109, 110, 111, 112, 114, 116, 117, 118, 119, 120, 122, 124, 126, 127, 128, 130, 131, 132, 134, 135, 137, 139, 140, 141, 142, 143, 144, 145, 146, 147, 148, 150, 151, 152, 153, 155, 157, 158, 160, 161, 162, 163, 165, 167, 168, 169, 170, 171, 173, 175, 176, 178, 180, 181, 182, 183, 184, 186, 188, 190, 192, 194, 195, 197, 199, 201, 203, 205, 207, 208, 209, 211, 213, 215, 217, 219, 220, 221, 222, 223, 225, 227, 229, 230, 231, 232, 233, 235, 237, 238, 239, 240, 241, 242, 244, 245, 246, 247, 248, 249, 251, 252, 253, 255, 256, 258, 260, 261, 263, 264, 266, 267, 269, 270, 271, 272, 273, 274, 275, 277, 279, 281, 282, 284, 286, 288, 289, 290, 291, 293, 295, 296, 297, 299, 300, 301, 302, 304, 306, 308, 309, 311, 312, 313, 314, 315, 316, 318, 319, 321, 322, 324, 326, 328, 329, 330, 331, 332, 333, 335, 336, 337, 339, 341, 343, 345, 347, 349, 351, 352, 353, 354, 356 and 357, and a candidate oxidative stress-modulating sequence. A candidate sequence typically has a length that is from 80 percent to 200 percent of the length of the reference sequence, e.g., 82, 85, 87, 89, 90, 93, 95, 97, 99, 100, 105, 110, 115, 120, 130, 140, 150, 160, 170, 180, 190, or 200 percent of the length of the reference sequence. A percent identity for any candidate nucleic acid or polypeptide relative to a reference nucleic acid or polypeptide can be determined as follows. A reference sequence (e.g., a nucleic acid sequence or an amino acid sequence) is aligned to one or more candidate sequences using the computer program ClustalW (version 1.83, default parameters), which allows alignments of nucleic acid or polypeptide sequences to be carried out across their entire length (global alignment). Chenna et al., Nucleic Acids Res., 31(13):3497-500 (2003).

[0090] ClustalW calculates the best match between a reference and one or more candidate sequences, and aligns them so that identities, similarities and differences can be determined. Gaps of one or more residues can be inserted into a reference sequence, a candidate sequence, or both, to maximize sequence alignments. For fast pairwise alignment of nucleic acid sequences, the following default parameters are used: word size: 2; window size: 4; scoring method: percentage; number of top diagonals: 4; and gap penalty: 5. For multiple alignment of nucleic acid sequences, the following parameters are used: gap opening penalty: 10.0; gap extension penalty: 5.0; and weight transitions: yes. For fast pairwise alignment of protein sequences, the following parameters are used: word size: 1; window size: 5; scoring method: percentage; number of top diagonals: 5; gap penalty: 3. For multiple alignment of protein sequences, the following parameters are used: weight matrix: blosum; gap opening penalty: 10.0; gap extension penalty: 0.05; hydrophilic gaps: on; hydrophilic residues: Gly, Pro, Ser, Asn, Asp, Gln, Glu, Arg, and Lys; residue-specific gap penalties: on. The ClustalW output is a sequence alignment that reflects the relationship between sequences. ClustalW can be run, for example, at the Baylor College of Medicine Search Launcher site (searchlauncher.bcm.tmc.edu/multi-align/multi-align.html) and at the European Bioinformatics Institute site on the World Wide Web (ebi.ac.uk/clustalw).

[0091] To determine percent identity of a candidate nucleic acid or amino acid sequence to a reference sequence, the sequences are aligned using ClustalW, the number of identical matches in the alignment is divided by the length of the reference sequence, and the result is multiplied by 100. It is noted that the percent identity value can be rounded to the nearest tenth. For example, 78.11, 78.12, 78.13, and 78.14 are rounded down to 78.1, while 78.15, 78.16, 78.17, 78.18, and 78.19 are rounded up to 78.2.

[0092] In some cases, an oxidative stress tolerance-modulating polypeptide has an amino acid sequence with at least 50% sequence identity, e.g., 50%, 52%, 56%, 59%, 61%, 65%, 70%, 75%, 80%, 85%, 90%, 95%, 97%, 98%, or 99% sequence identity, to one or more of the amino acid sequence set forth in SEQ ID NO: 79 Amino acid sequences of polypeptides having high sequence identity to the polypeptide set forth in SEQ ID NO: 79 are provided in the Sequence Listing. Such polypeptides include SEQ ID NO: 80, 82, 83, 84, 85, 87, 88, 89, 90, 91, 128, 130, 131, 132, 134, 135, 137, 139, 140, 141, 142, 143, 144, 145, 146, 147, 148, 150, 151, 152, 153, 155, 157, 158, 160, 161, 162, 163, 165, 167, 168, 169, 170, 171, 173, 175, 176, 178, 180, 181, 182, 183, 184, 186, 188, 190, 192, 194, 195, 197, 199, 201, 203, 205, 207, 208, 209, 211, 213, 215, 217, 219, 220, 221, 222, 223, 225, 227, 229, 230, 231, 232, 233, 235, 237, 238, 239, 240, 241, 242, 244, 245, 246, 247 and 248.

[0093] In some cases, an oxidative stress tolerance-modulating polypeptide has an amino acid sequence with at least 50% sequence identity, e.g., 50%, 52%, 56%, 59%, 61%, 65%, 70%, 75%, 80%, 85%, 90%, 95%, 97%, 98%, or 99% sequence identity, to the amino acid sequence set forth in SEQ ID NO: 94. Amino acid sequences of polypeptides having high sequence identity to the polypeptide set forth in SEQ ID NO: 94 are provided in the Sequence Listing. Such polypeptides include SEQ ID NO: SEQ ID NO: 96, 97, 98, 99, 100, 249, 251, 252, 253, 255, 256, 258, 260, 261, 263, 264, 266, 267, 269, 270, 271, 272, 273, 274, 275, 277, 279, 281, 282, 284, 286, 288, 289, 290, 291, 293, 295, 296, 297, 299, 300, 301, 302, 304, 306, 308, 309, 311, 312, 313, 314, 315, 316, 318, 319, 321, 322, 324, 326, 328, 329, 330, 331, 332, 333, 335, 336, 337, 339, 341, 343, 345, 347, 349, 351, 352 and 353.

[0094] In some cases, an oxidative stress-modulating polypeptide has an amino acid sequence with at least 50% sequence identity, e.g., 50%, 52%, 56%, 59%, 61%, 65%, 70%, 75%, 80%, 85%, 90%, 95%, 97%, 98%, or 99% sequence identity, to the amino acid sequence set forth in SEQ ID NO: 102. Amino acid sequences of polypeptides having high sequence identity to the polypeptide set forth in SEQ ID NO: 102 are provided in the Sequence Listing. Such polypeptides include SEQ ID NO: 102, 104, 105, 109, 110, 111, 112, 114, 116, 117, 118, 119, 120, 122, 124, 126 and 127.

[0095] In some cases, an oxidative stress-modulating polypeptide has an amino acid sequence with at least 50% sequence identity, e.g., 50%, 52%, 56%, 59%, 61%, 65%, 70%, 75%, 80%, 85%, 90%, 95%, 97%, 98%, or 99% sequence identity, to the amino acid sequence set forth in SEQ ID NO: 107. Amino acid sequences of polypeptides having high sequence identity to the polypeptide set forth in SEQ ID NO: 107 are provided in the Sequence Listing. Such polypeptides include SEQ ID NO: 354, 356 and 357.

[0096] E. Other Sequences

[0097] It should be appreciated that an oxidative stress tolerance-modulating polypeptide can include additional amino acids that are not involved in oxidative stress tolerance modulation, and thus such a polypeptide can be longer than would otherwise be the case. For example, an oxidative stress-tolerance modulating polypeptide can include a purification tag, a chloroplast transit peptide, an transit peptide, a mitochondrial transit peptide, or a leader sequence added to the amino or carboxy terminus. In some embodiments, an oxidative stress-tolerance modulating polypeptide includes an amino acid sequence that functions as a reporter, e.g., a green fluorescent protein or yellow fluorescent protein.

### III. NUCLEIC ACIDS

[0098] Nucleic acids described herein include nucleic acids that are effective to modulate oxidative stress tolerance levels when transcribed in a plant or plant cell. Such nucleic acids include, without limitation, those that encode an oxidative stress tolerance-modulating polypeptide and those that can be used to inhibit expression of an oxidative stress tolerance-modulating polypeptide via a nucleic acid based method.

[0099] A. Nucleic Acids Encoding Oxidative Stress Tolerance-Modulating Polypeptides

[0100] Nucleic acids encoding oxidative stress tolerance-modulating polypeptides are described herein. Such nucleic acids include SEQ ID NOs: 78, 81, 86, 92, 93, 95, 101, 103, 106, 108, 113, 115, 121, 123, 125, 129, 133, 136, 138, 149, 154, 156, 159, 164, 166, 172, 174, 177, 179, 185, 187, 189, 191, 193, 196, 198, 200, 202, 204, 206, 210, 212, 214, 216, 218, 224, 226, 228, 234, 236, 243, 250, 254, 257, 259, 262, 265, 268, 276, 278, 280, 283, 285, 287, 292, 294, 298, 303, 305, 307, 310, 317, 320, 323, 325, 327, 334, 338, 340, 342, 344, 346, 348, 350 and 355, as described in more detail below.

[0101] An oxidative stress tolerance-modulating nucleic acid can comprise the nucleotide sequence set forth in SEQ ID NO: 78. Alternatively, an oxidative stress tolerance-modulating nucleic acid can be a variant of the nucleic acid having the nucleotide sequence set forth in SEQ ID NO: 78. For example, an oxidative stress tolerance-modulating nucleic acid can have a nucleotide sequence with at least 80% sequence identity, e.g., 81%, 85%, 90%, 95%, 97%, 98%, or 99% sequence identity, to the nucleotide sequence set forth in SEQ ID NO: 78, 81, 86, 127, 129, 133, 136, 138, 149, 154, 156, 159, 164, 166, 172, 174, 177, 179, 185, 187, 189, 191, 193, 196, 198, 200, 202, 204, 206, 210, 212, 214, 216, 218, 224, 226, 228, 234, 236 and 243.

[0102] An oxidative stress tolerance-modulating nucleic acid can comprise the nucleotide sequence set forth in SEQ ID NO: 93. Alternatively, an oxidative stress tolerance-modulating nucleic acid can be a variant of the nucleic acid having the nucleotide sequence set forth in SEQ ID NO: 93. For example, an oxidative stress tolerance-modulating nucleic acid can have a nucleotide sequence with at least 80% sequence identity, e.g., 81%, 85%, 90%, 95%, 97%, 98%, or 99% sequence identity, to the nucleotide sequence set forth in SEQ ID NO: 93, 95, 250, 254, 257, 259, 262, 265, 268, 276, 278, 280, 283, 285, 287, 292, 294, 298, 303, 305, 307, 310, 317, 320, 323, 325, 327, 334, 338, 340, 342, 344, 346 and 348.

[0103] An oxidative stress tolerance-modulating nucleic acid can comprise the nucleotide sequence set forth in SEQ ID NO: 101. Alternatively, an oxidative stress tolerance-modulating nucleic acid can be a variant of the nucleic acid having the nucleotide sequence set forth in SEQ ID NO: 101. For example, an oxidative stress tolerance-modulating nucleic acid can have a nucleotide sequence with at least 80% sequence identity, e.g., 81%, 85%, 90%, 95%, 97%, 98%, or 99% sequence identity, to the nucleotide sequence set forth in SEQ ID NO: 101, 103, 106, 108, 113, 115, 121, 123 and 125.

[0104] An oxidative stress tolerance-modulating nucleic acid can comprise the nucleotide sequence set forth in SEQ ID NO: 355. Alternatively, an oxidative stress tolerance-modulating nucleic acid can be a variant of the nucleic acid having the nucleotide sequence set forth in SEQ ID NO: 355. For example, an oxidative stress tolerance-modulating nucleic acid can have a nucleotide sequence with at least 80% sequence identity, e.g., 81%, 85%, 90%, 95%, 97%, 98%, or 99% sequence identity, to the nucleotide sequence set forth in SEQ ID NO: 355.

[0105] Isolated nucleic acid molecules can be produced by standard techniques. For example, polymerase chain reaction (PCR) techniques can be used to obtain an isolated nucleic acid containing a nucleotide sequence described herein. PCR can be used to amplify specific sequences from DNA as well as RNA, including sequences from total genomic DNA or total cellular RNA. Various PCR methods are described, for example, in PCR Primer: A Laboratory Manual, Dieffenbach and Dveksler, eds., Cold Spring Harbor Laboratory Press, 1995. Generally, sequence information from the ends of the region of interest or beyond is employed to design oligonucleotide primers that are identical or similar in sequence to opposite strands of the template to be amplified. Various PCR strategies also are available by which site-specific nucleotide sequence modifications can be introduced into a template nucleic acid. Isolated nucleic acids also can be chemically synthesized, either as a single nucleic acid molecule (e.g., using automated DNA synthesis in the 3′ to 5′ direction using phosphoramidite technology) or as a series of oligonucleotides. For example, one or more pairs of long oligonucleotides (e.g., >100 nucleotides) can be synthesized that contain the desired sequence, with each pair containing a short segment of complementarity (e.g., about 15 nucleotides) such that a duplex is formed when the oligonucleotide pair is annealed. DNA polymerase is used to extend the oligonucleotides, resulting in a single, double-stranded nucleic acid molecule per oligonucleotide pair, which then can be ligated into a vector. Isolated nucleic acids of the invention also can be obtained by mutagenesis of, e.g., a naturally occurring DNA.

[0106] B. Use of Nucleic Acids to Modulate Expression of Polypeptides

[0107] i. Expression of an oxidative stress tolerance-Modulating Polypeptide

[0108] A nucleic acid encoding one of the oxidative stress tolerance-modulating polypeptides described herein can be used to express the polypeptide in a plant species of interest, typically by transforming a plant cell with a nucleic acid having the coding sequence for the polypeptide operably linked in sense orientation to one or more regulatory regions. It will be appreciated that because of the degeneracy of the genetic code, a number of nucleic acids can encode a particular oxidative stress tolerance-modulating polypeptide; i.e., for many amino acids, there is more than one nucleotide triplet that serves as the codon for the amino acid. Thus, codons in the coding sequence for a given oxidative stress tolerance-modulating polypeptide can be modified such that optimal expression in a particular plant species is obtained, using appropriate codon bias tables for that species.

[0109] In some cases, expression of an oxidative stress tolerance-modulating polypeptide inhibits one or more functions of an endogenous polypeptide. For example, a nucleic acid that encodes a dominant negative polypeptide can be used to inhibit protein function. A dominant negative polypeptide typically is mutated or truncated relative to an endogenous wild type polypeptide, and its presence in a cell inhibits one or more functions of the wild type polypeptide in that cell, i.e., the dominant negative polypeptide is genetically dominant and confers a loss of function. The mechanism by which a dominant negative polypeptide confers such a phenotype can vary but often involves a protein-protein interaction or a protein-DNA interaction. For example, a dominant negative polypeptide can be an enzyme that is truncated relative to a native wild type enzyme, such that the truncated polypeptide retains domains involved in binding a first protein but lacks domains involved in binding a second protein. The truncated polypeptide is thus unable to properly modulate the activity of the second protein. See, e.g., US 2007/0056058. As another example, a point mutation that results in a non-conservative amino acid substitution in a catalytic domain can result in a dominant negative polypeptide. See, e.g., US 2005/032221. As another example, a dominant negative polypeptide can be a transcription factor that is truncated relative to a native wild type transcription factor, such that the truncated polypeptide retains the DNA binding domain(s) but lacks the activation domain(s). Such a truncated polypeptide can inhibit the wild type transcription factor from binding DNA, thereby inhibiting transcription activation.

[0110] ii. Inhibition of Expression of an Oxidative Stress Tolerance-Modulating Polypeptide

[0111] Polynucleotides and recombinant constructs described herein can be used to inhibit expression of an oxidative stress tolerance-modulating polypeptide in a plant species of interest. See, e.g., Matzke and Birchler, Nature Reviews Genetics 6:24-35 (2005); Akashi et al., Nature Reviews Mol. Cell. Biology 6:413-422 (2005); Mittal, Nature Reviews Genetics 5:355-365 (2004); Dorsett and Tuschl, Nature Reviews Drug Discovery 3: 318-329 (2004); and Nature Reviews RNA interference collection, October 2005 at nature.com/reviews/focus/mai. A number of nucleic acid based methods, including antisense RNA, ribozyme directed RNA cleavage, post-transcriptional gene silencing (PTGS), e.g., RNA interference (RNAi), and transcriptional gene silencing (TGS) are known to inhibit gene expression in plants. Antisense technology is one well-known method. In this method, a nucleic acid segment from a gene to be repressed is cloned and operably linked to a regulatory region and a transcription termination sequence so that the antisense strand of RNA is transcribed. The recombinant construct is then transformed into plants, as described herein, and the antisense strand of RNA is produced. The nucleic acid segment need not be the entire sequence of the gene to be repressed, but typically will be substantially complementary to at least a portion of the sense strand of the gene to be repressed. Generally, higher homology can be used to compensate for the use of a shorter sequence. Typically, a sequence of at least 30 nucleotides is used, e.g., at least 40, 50, 80, 100, 200, 500 nucleotides or more.

[0112] In another method, a nucleic acid can be transcribed into a ribozyme, or catalytic RNA, that affects expression of an mRNA. See, U.S. Pat. No. 6,423,885. Ribozymes can be designed to specifically pair with virtually any target RNA and cleave the phosphodiester backbone at a specific location, thereby functionally inactivating the target RNA. Heterologous nucleic acids can encode ribozymes designed to cleave particular mRNA transcripts, thus preventing expression of a polypeptide. Hammerhead ribozymes are useful for destroying particular mRNAs, although various ribozymes that cleave mRNA at site-specific recognition sequences can be used. Hammerhead ribozymes cleave mRNAs at locations dictated by flanking regions that form complementary base pairs with the target mRNA. The sole requirement is that the target RNA contains a 5′-UG-3′ nucleotide sequence. The construction and production of hammerhead ribozymes is known in the art. See, for example, U.S. Pat. No. 5,254,678 and WO 02/46449 and references cited therein. Hammerhead ribozyme sequences can be embedded in a stable RNA such as a transfer RNA (tRNA) to increase cleavage efficiency in vivo. Perriman et al., Proc. Natl. Acad. Sci. USA, 92(13):6175-6179 (1995); de Feyter and Gaudron, Methods in Molecular Biology, Vol. 74, Chapter 43, “Expressing Ribozymes in Plants”, Edited by Turner, P. C., Humana Press Inc., Totowa, N.J. RNA endoribonucleases which have been described, such as the one that occurs naturally in Tetrahymena thermophila, can be useful. See, for example, U.S. Pat. Nos. 4,987,071 and 6,423,885.

[0113] PTGS, e.g., RNAi, can also be used to inhibit the expression of a gene. For example, a construct can be prepared that includes a sequence that is transcribed into an RNA that can anneal to itself, e.g., a double stranded RNA having a stem-loop structure. In some embodiments, one strand of the stem portion of a double stranded RNA comprises a sequence that is similar or identical to the sense coding sequence of an oxidative stress tolerance-modulating polypeptide, and that is from about 10 nucleotides to about 2,500 nucleotides in length. The length of the sequence that is similar or identical to the sense coding sequence can be from 10 nucleotides to 500 nucleotides, from 15 nucleotides to 300 nucleotides, from 20 nucleotides to 100 nucleotides, or from 25 nucleotides to 100 nucleotides. The other strand of the stem portion of a double stranded RNA comprises a sequence that is similar or identical to the antisense strand of the coding sequence of the oxidative stress tolerance-modulating polypeptide, and can have a length that is shorter, the same as, or longer than the corresponding length of the sense sequence. In some cases, one strand of the stem portion of a double stranded RNA comprises a sequence that is similar or identical to the 3′ or 5′ untranslated region of an mRNA encoding an oxidative stress tolerance-modulating polypeptide, and the other strand of the stem portion of the double stranded RNA comprises a sequence that is similar or identical to the sequence that is complementary to the 3′ or 5′ untranslated region, respectively, of the mRNA encoding the oxidative stress tolerance-modulating polypeptide. In other embodiments, one strand of the stem portion of a double stranded RNA comprises a sequence that is similar or identical to the sequence of an intron in the pre-mRNA encoding an oxidative stress tolerance-modulating polypeptide, and the other strand of the stem portion comprises a sequence that is similar or identical to the sequence that is complementary to the sequence of the intron in the pre-mRNA. The loop portion of a double stranded RNA can be from 3 nucleotides to 5,000 nucleotides, e.g., from 3 nucleotides to 25 nucleotides, from 15 nucleotides to 1,000 nucleotides, from 20 nucleotides to 500 nucleotides, or from 25 nucleotides to 200 nucleotides. The loop portion of the RNA can include an intron. A double stranded RNA can have zero, one, two, three, four, five, six, seven, eight, nine, ten, or more stem-loop structures. A construct including a sequence that is operably linked to a regulatory region and a transcription termination sequence, and that is transcribed into an RNA that can form a double stranded RNA, is transformed into plants as described herein. Methods for using RNAi to inhibit the expression of a gene are known to those of skill in the art. See, e.g., U.S. Pat. Nos. 5,034,323; 6,326,527; 6,452,067; 6,573,099; 6,753,139; and 6,777,588. See also WO 97/01952; WO 98/53083; WO 99/32619; WO 98/36083; and U.S. Patent Publications 20030175965, 20030175783, 20040214330, and 20030180945.

[0114] Constructs containing regulatory regions operably linked to nucleic acid molecules in sense orientation can also be used to inhibit the expression of a gene. The transcription product can be similar or identical to the sense coding sequence of an oxidative stress tolerance-modulating polypeptide. The transcription product can also be unpolyadenylated, lack a 5′ cap structure, or contain an unsplicable intron. Methods of inhibiting gene expression using a full-length cDNA as well as a partial cDNA sequence are known in the art. See, e.g., U.S. Pat. No. 5,231,020.

[0115] In some embodiments, a construct containing a nucleic acid having at least one strand that is a template for both sense and antisense sequences that are complementary to each other is used to inhibit the expression of a gene. The sense and antisense sequences can be part of a larger nucleic acid molecule or can be part of separate nucleic acid molecules having sequences that are not complementary. The sense or antisense sequence can be a sequence that is identical or complementary to the sequence of an mRNA, the 3′ or 5′ untranslated region of an mRNA, or an intron in a pre-mRNA encoding an oxidative stress tolerance-modulating polypeptide. In some embodiments, the sense or antisense sequence is identical or complementary to a sequence of the regulatory region that drives transcription of the gene encoding an oxidative stress tolerance-modulating polypeptide. In each case, the sense sequence is the sequence that is complementary to the antisense sequence.

[0116] The sense and antisense sequences can be any length greater than about 12 nucleotides (e.g., 13, 14, 15, 16, 17, 18, 19, 20, 21, 22, 23, 24, 25, 26, 27, 28, 29, 30, or more nucleotides). For example, an antisense sequence can be 21 or 22 nucleotides in length. Typically, the sense and antisense sequences range in length from about 15 nucleotides to about 30 nucleotides, e.g., from about 18 nucleotides to about 28 nucleotides, or from about 21 nucleotides to about 25 nucleotides.

[0117] In some embodiments, an antisense sequence is a sequence complementary to an mRNA sequence encoding an oxidative stress tolerance-modulating polypeptide described herein. The sense sequence complementary to the antisense sequence can be a sequence present within the mRNA of the oxidative stress tolerance-modulating polypeptide. Typically, sense and antisense sequences are designed to correspond to a 15-30 nucleotide sequence of a target mRNA such that the level of that target mRNA is reduced.

[0118] In some embodiments, a construct containing a nucleic acid having at least one strand that is a template for more than one sense sequence (e.g., 2, 3, 4, 5, 6, 7, 8, 9, 10 or more sense sequences) can be used to inhibit the expression of a gene Likewise, a construct containing a nucleic acid having at least one strand that is a template for more than one antisense sequence (e.g., 2, 3, 4, 5, 6, 7, 8, 9, 10 or more antisense sequences) can be used to inhibit the expression of a gene. For example, a construct can contain a nucleic acid having at least one strand that is a template for two sense sequences and two antisense sequences. The multiple sense sequences can be identical or different, and the multiple antisense sequences can be identical or different. For example, a construct can have a nucleic acid having one strand that is a template for two identical sense sequences and two identical antisense sequences that are complementary to the two identical sense sequences. Alternatively, an isolated nucleic acid can have one strand that is a template for (1) two identical sense sequences 20 nucleotides in length, (2) one antisense sequence that is complementary to the two identical sense sequences 20 nucleotides in length, (3) a sense sequence 30 nucleotides in length, and (4) three identical antisense sequences that are complementary to the sense sequence 30 nucleotides in length. The constructs provided herein can be designed to have any arrangement of sense and antisense sequences. For example, two identical sense sequences can be followed by two identical antisense sequences or can be positioned between two identical antisense sequences.

[0119] A nucleic acid having at least one strand that is a template for one or more sense and/or antisense sequences can be operably linked to a regulatory region to drive transcription of an RNA molecule containing the sense and/or antisense sequence(s). In addition, such a nucleic acid can be operably linked to a transcription terminator sequence, such as the terminator of the nopaline synthase (nos) gene. In some cases, two regulatory regions can direct transcription of two transcripts: one from the top strand, and one from the bottom strand. See, for example, Yan et al., Plant Physiol., 141:1508-1518 (2006). The two regulatory regions can be the same or different. The two transcripts can form double-stranded RNA molecules that induce degradation of the target RNA. In some cases, a nucleic acid can be positioned within a T-DNA or plant-derived transfer DNA (P-DNA) such that the left and right T-DNA border sequences, or the left and right border-like sequences of the P-DNA, flank or are on either side of the nucleic acid. See, US 2006/0265788. The nucleic acid sequence between the two regulatory regions can be from about 15 to about 300 nucleotides in length. In some embodiments, the nucleic acid sequence between the two regulatory regions is from about 15 to about 200 nucleotides in length, from about 15 to about 100 nucleotides in length, from about 15 to about 50 nucleotides in length, from about 18 to about 50 nucleotides in length, from about 18 to about 40 nucleotides in length, from about 18 to about 30 nucleotides in length, or from about 18 to about 25 nucleotides in length.

[0120] In some nucleic-acid based methods for inhibition of gene expression in plants, a suitable nucleic acid can be a nucleic acid analog. Nucleic acid analogs can be modified at the base moiety, sugar moiety, or phosphate backbone to improve, for example, stability, hybridization, or solubility of the nucleic acid. Modifications at the base moiety include deoxyuridine for deoxythymidine, and 5-methyl-2′-deoxycytidine and 5-bromo-2′-deoxycytidine for deoxycytidine. Modifications of the sugar moiety include modification of the 2′ hydroxyl of the ribose sugar to form 2′-O-methyl or 2′-O-allyl sugars. The deoxyribose phosphate backbone can be modified to produce morpholino nucleic acids, in which each base moiety is linked to a six-membered morpholino ring, or peptide nucleic acids, in which the deoxyphosphate backbone is replaced by a pseudopeptide backbone and the four bases are retained. See, for example, Summerton and Weller, 1997, Antisense Nucleic Acid Drug Dev., 7:187-195; Hyrup et al., Bioorgan. Med. Chem., 4:5-23 (1996). In addition, the deoxyphosphate backbone can be replaced with, for example, a phosphorothioate or phosphorodithioate backbone, a phosphoroamidite, or an alkyl phosphotriester backbone.

[0121] C. Constructs/Vectors

[0122] Recombinant constructs provided herein can be used to transform plants or plant cells in order to modulate oxidative stress tolerance levels. A recombinant nucleic acid construct can comprise a nucleic acid encoding an oxidative stress tolerance-modulating polypeptide as described herein, operably linked to a regulatory region suitable for expressing the oxidative stress tolerance-modulating polypeptide in the plant or cell. Thus, a nucleic acid can comprise a coding sequence that encodes any of the oxidative stress tolerance-modulating polypeptides as set forth in SEQ ID NOs: 79, 80, 82, 83, 84, 85, 87, 88, 89, 90, 91, 94, 96, 97, 98, 99, 100, 102, 104, 105, 107, 109, 110, 111, 112, 114, 116, 117, 118, 119, 120, 122, 124, 126, 127, 128, 130, 131, 132, 134, 135, 137, 139, 140, 141, 142, 143, 144, 145, 146, 147, 148, 150, 151, 152, 153, 155, 157, 158, 160, 161, 162, 163, 165, 167, 168, 169, 170, 171, 173, 175, 176, 178, 180, 181, 182, 183, 184, 186, 188, 190, 192, 194, 195, 197, 199, 201, 203, 205, 207, 208, 209, 211, 213, 215, 217, 219, 220, 221, 222, 223, 225, 227, 229, 230, 231, 232, 233, 235, 237, 238, 239, 240, 241, 242, 244, 245, 246, 247, 248, 249, 251, 252, 253, 255, 256, 258, 260, 261, 263, 264, 266, 267, 269, 270, 271, 272, 273, 274, 275, 277, 279, 281, 282, 284, 286, 288, 289, 290, 291, 293, 295, 296, 297, 299, 300, 301, 302, 304, 306, 308, 309, 311, 312, 313, 314, 315, 316, 318, 319, 321, 322, 324, 326, 328, 329, 330, 331, 332, 333, 335, 336, 337, 339, 341, 343, 345, 347, 349, 351, 352, 353, 354, 356 and 357. Examples of nucleic acids encoding oxidative stress tolerance-modulating polypeptides are set forth in SEQ ID NOs: 78, 81, 86, 92, 93, 95, 101, 103, 106, 108, 113, 115, 121, 123, 125, 129, 133, 136, 138, 149, 154, 156, 159, 164, 166, 172, 174, 177, 179, 185, 187, 189, 191, 193, 196, 198, 200, 202, 204, 206, 210, 212, 214, 216, 218, 224, 226, 228, 234, 236, 243, 250, 254, 257, 259, 262, 265, 268, 276, 278, 280, 283, 285, 287, 292, 294, 298, 303, 305, 307, 310, 317, 320, 323, 325, 327, 334, 338, 340, 342, 344, 346, 348, 350 and 355. The oxidative stress tolerance-modulating polypeptide encoded by a recombinant nucleic acid can be a native oxidative stress tolerance-modulating polypeptide, or can be heterologous to the cell. In some cases, the recombinant construct contains a nucleic acid that inhibits expression of an oxidative stress tolerance-modulating polypeptide, operably linked to a regulatory region. Examples of suitable regulatory regions are described in the section entitled “Regulatory Regions.”

[0123] Vectors containing recombinant nucleic acid constructs such as those described herein also are provided. Suitable vector backbones include, for example, those routinely used in the art such as plasmids, viruses, artificial chromosomes, BACs, YACs, or PACs. Suitable expression vectors include, without limitation, plasmids and viral vectors derived from, for example, bacteriophage, baculoviruses, and retroviruses. Numerous vectors and expression systems are commercially available from such corporations as Novagen (Madison, Wis.), Clontech (Palo Alto, Calif.), Stratagene (La Jolla, Calif.), and Invitrogen/Life Technologies (Carlsbad, Calif.).

[0124] The vectors provided herein also can include, for example, origins of replication, scaffold attachment regions (SARs), and/or markers. A marker gene can confer a selectable phenotype on a plant cell. For example, a marker can confer biocide resistance, such as resistance to an antibiotic (e.g., kanamycin, G418, bleomycin, or hygromycin), or an herbicide (e.g., glyphosate, chlorsulfuron or phosphinothricin). In addition, an expression vector can include a tag sequence designed to facilitate manipulation or detection (e.g., purification or localization) of the expressed polypeptide. Tag sequences, such as luciferase, β-glucuronidase (GUS), green fluorescent protein (GFP), glutathione S-transferase (GST), polyhistidine, c-myc, hemagglutinin, or Flag™ tag (Kodak, New Haven, Conn.) sequences typically are expressed as a fusion with the encoded polypeptide. Such tags can be inserted anywhere within the polypeptide, including at either the carboxyl or amino terminus.

[0125] D. Regulatory Regions

[0126] The choice of regulatory regions to be included in a recombinant construct depends upon several factors, including, but not limited to, efficiency, selectability, inducibility, desired expression level, and cell- or tissue-preferential expression. It is a routine matter for one of skill in the art to modulate the expression of a coding sequence by appropriately selecting and positioning regulatory regions relative to the coding sequence. Transcription of a nucleic acid can be modulated in a similar manner.

[0127] Some suitable promoters initiate transcription only, or predominantly, in certain cell types. The choice of regulatory regions to be included in a recombinant construct depends upon several factors, including, but not limited to, efficiency, selectability, inducibility, desired expression level, and cell- or tissue-preferential expression. It is a routine matter for one of skill in the art to modulate the expression of a coding sequence by appropriately selecting and positioning regulatory regions relative to the coding sequence. Transcription of a nucleic acid can be modulated in a similar manner.

[0128] Some suitable regulatory regions initiate transcription only, or predominantly, in certain cell types. Methods for identifying and characterizing regulatory regions in plant genomic DNA are known, including, for example, those described in the following references: Jordano et al., Plant Cell, 1:855-866 (1989); Bustos et al., Plant Cell, 1:839-854 (1989); Green et al., EMBO J., 7:4035-4044 (1988); Meier et al., Plant Cell, 3:309-316 (1991); and Zhang et al., Plant Physiology, 110:1069-1079 (1996).

[0129] Examples of various classes of regulatory regions are described below. Some of the regulatory regions indicated below as well as additional regulatory regions are described in more detail in U.S. Patent Application Ser. Nos. 60/505,689; 60/518,075; 60/544,771; 60/558,869; 60/583,691; 60/619,181; 60/637,140; 60/757,544; 60/776,307; 10/957,569; 11/058,689; 11/172,703; 11/208,308; 11/274,890; 60/583,609; 60/612,891; 11/097,589; 11/233,726; 11/408,791; 11/414,142; 10/950,321; 11/360,017; PCT/US05/011105; PCT/US05/23639; PCT/US05/034308; PCT/US05/034343; and PCT/US06/038236; PCT/US06/040572; and PCT/US07/62762.

[0130] For example, the sequences of regulatory regions p326, YP0144, YP0190, p13879, YP0050, p32449, 21876, YP0158, YP0214, YP0380, PT0848, PT0633, YP0128, YP0275, PT0660, PT0683, PT0758, PT0613, PT0672, PT0688, PT0837, YP0092, PT0676, PT0708, YP0396, YP0007, YP0111, YP0103, YP0028, YP0121, YP0008, YP0039, YP0115, YP0119, YP0120, YP0374, YP0101, YP0102, YP0110, YP0117, YP0137, YP0285, YP0212, YP0097, YP0107, YP0088, YP0143, YP0156, PT0650, PT0695, PT0723, PT0838, PT0879, PT0740, PT0535, PT0668, PT0886, PT0585, YP0381, YP0337, PT0710, YP0356, YP0385, YP0384, YP0286, YP0377, PD1367, PT0863, PT0829, PT0665, PT0678, YP0086, YP0188, YP0263, PT0743 and YP0096 are set forth in the sequence listing of PCT/US06/040572; the sequence of regulatory region PT0625 is set forth in the sequence listing of PCT/US05/034343; the sequences of regulatory regions PT0623, YP0388, YP0087, YP0093, YP0108, YP0022 and YP0080 are set forth in the sequence listing of U.S. patent application Ser. No. 11/172,703; the sequence of regulatory region PR0924 is set forth in the sequence listing of PCT/US07/62762; and the sequences of regulatory regions p530c10, pOsFIE2-2, pOsMEA, pOsYp102, and pOsYp285 are set forth in the sequence listing of PCT/US06/038236.

[0131] It will be appreciated that a regulatory region may meet criteria for one classification based on its activity in one plant species, and yet meet criteria for a different classification based on its activity in another plant species.

[0132] i. Broadly Expressing Promoters

[0133] A promoter can be said to be “broadly expressing” when it promotes transcription in many, but not necessarily all, plant tissues. For example, a broadly expressing promoter can promote transcription of an operably linked sequence in one or more of the shoot, shoot tip (apex), and leaves, but weakly or not at all in tissues such as roots or stems. As another example, a broadly expressing promoter can promote transcription of an operably linked sequence in one or more of the stem, shoot, shoot tip (apex), and leaves, but can promote transcription weakly or not at all in tissues such as reproductive tissues of flowers and developing seeds. Non-limiting examples of broadly expressing promoters that can be included in the nucleic acid constructs provided herein include the p326, YP0144, YP0190, p13879, YP0050, p32449, 21876, YP0158, YP0214, YP0380, PT0848, and PT0633 promoters. Additional examples include the cauliflower mosaic virus (CaMV) 35S promoter, the mannopine synthase (MAS) promoter, the 1′ or 2′ promoters derived from T-DNA of Agrobacterium tumefaciens, the figwort mosaic virus 34S promoter, actin promoters such as the rice actin promoter, and ubiquitin promoters such as the maize ubiquitin-1 promoter. In some cases, the CaMV 35S promoter is excluded from the category of broadly expressing promoters.

[0134] ii. Root Promoters

[0135] Root-active promoters confer transcription in root tissue, e.g., root endodermis, root epidermis, or root vascular tissues. In some embodiments, root-active promoters are root-preferential promoters, i.e., confer transcription only or predominantly in root tissue. Root-preferential promoters include the YP0128, YP0275, PT0625, PT0660, PT0683, and PT0758 promoters. Other root-preferential promoters include the PT0613, PT0672, PT0688, and PT0837 promoters, which drive transcription primarily in root tissue and to a lesser extent in ovules and/or seeds. Other examples of root-preferential promoters include the root-specific subdomains of the CaMV 35S promoter (Lam et al., Proc. Natl. Acad. Sci. USA, 86:7890-7894 (1989)), root cell specific promoters reported by Conkling et al., Plant Physiol., 93:1203-1211 (1990), and the tobacco RD2 promoter.

[0136] iii. Maturing Endosperm Promoters

[0137] In some embodiments, promoters that drive transcription in maturing endosperm can be useful. Transcription from a maturing endosperm promoter typically begins after fertilization and occurs primarily in endosperm tissue during seed development and is typically highest during the cellularization phase. Most suitable are promoters that are active predominantly in maturing endosperm, although promoters that are also active in other tissues can sometimes be used. Non-limiting examples of maturing endosperm promoters that can be included in the nucleic acid constructs provided herein include the napin promoter, the Arcelin-5 promoter, the phaseolin promoter (Bustos et al., Plant Cell, 1(9):839-853 (1989)), the soybean trypsin inhibitor promoter (Riggs et al., Plant Cell, 1(6):609-621 (1989)), the ACP promoter (Baerson et al., Plant Mol. Biol., 22(2):255-267 (1993)), the stearoyl-ACP desaturase promoter (Slocombe et al., Plant Physiol., 104(4):167-176 (1994)), the soybean α′ subunit of β-conglycinin promoter (Chen et al., Proc. Natl. Acad. Sci. USA, 83:8560-8564 (1986)), the oleosin promoter (Hong et al., Plant Mol. Biol., 34(3):549-555 (1997)), and zein promoters, such as the 15 kD zein promoter, the 16 kD zein promoter, 19 kD zein promoter, 22 kD zein promoter and 27 kD zein promoter. Also suitable are the Osgt-1 promoter from the rice glutelin-1 gene (Zheng et al., Mol. Cell. Biol., 13:5829-5842 (1993)), the beta-amylase promoter, and the barley hordein promoter. Other maturing endosperm promoters include the YP0092, PT0676, and PT0708 promoters.

[0138] iv. Ovary Tissue Promoters

[0139] Promoters that are active in ovary tissues such as the ovule wall and mesocarp can also be useful, e.g., a polygalacturonidase promoter, the banana TRX promoter, the melon actin promoter, YP0396, and PT0623. Examples of promoters that are active primarily in ovules include YP0007, YP0111, YP0092, YP0103, YP0028, YP0121, YP0008, YP0039, YP0115, YP0119, YP0120, and YP0374.

[0140] v. Embryo Sac/Early Endosperm Promoters

[0141] To achieve expression in embryo sac/early endosperm, regulatory regions can be used that are active in polar nuclei and/or the central cell, or in precursors to polar nuclei, but not in egg cells or precursors to egg cells. Most suitable are promoters that drive expression only or predominantly in polar nuclei or precursors thereto and/or the central cell. A pattern of transcription that extends from polar nuclei into early endosperm development can also be found with embryo sac/early endosperm-preferential promoters, although transcription typically decreases significantly in later endosperm development during and after the cellularization phase. Expression in the zygote or developing embryo typically is not present with embryo sac/early endosperm promoters.

[0142] Promoters that may be suitable include those derived from the following genes: Arabidopsis viviparous-1 (see, GenBank No. U93215); Arabidopsis atmycl (see, Urao (1996) Plant Mol. Biol., 32:571-57; Conceicao (1994) Plant, 5:493-505); Arabidopsis FIE (GenBank No. AF129516); Arabidopsis MEA; Arabidopsis FIS2 (GenBank No. AF096096); and FIE 1.1 (U.S. Pat. No. 6,906,244). Other promoters that may be suitable include those derived from the following genes: maize MAC1 (see, Sheridan (1996) Genetics, 142:1009-1020); maize Cat3 (see, GenBank No. L05934; Abler (1993) Plant Mol. Biol., 22:10131-1038). Other promoters include the following Arabidopsis promoters: YP0039, YP0101, YP0102, YP0110, YP0117, YP0119, YP0137, DME, YP0285, and YP0212. Other promoters that may be useful include the following rice promoters: p530c10, pOsFIE2-2, pOsMEA, pOsYp102, and pOsYp285.

[0143] vi. Embryo Promoters

[0144] Regulatory regions that preferentially drive transcription in zygotic cells following fertilization can provide embryo-preferential expression. Most suitable are promoters that preferentially drive transcription in early stage embryos prior to the heart stage, but expression in late stage and maturing embryos is also suitable. Embryo-preferential promoters include the barley lipid transfer protein (Ltp1) promoter (Plant Cell Rep (2001) 20:647-654), YP0097, YP0107, YP0088, YP0143, YP0156, PT0650, PT0695, PT0723, PT0838, PT0879, and PT0740.

[0145] vii. Photosynthetic Tissue Promoters

[0146] Promoters active in photosynthetic tissue confer transcription in green tissues such as leaves and stems. Most suitable are promoters that drive expression only or predominantly in such tissues. Examples of such promoters include the ribulose-1,5-bisphosphate carboxylase (RbcS) promoters such as the RbcS promoter from eastern larch (Larix laricina), the pine cab6 promoter (Yamamoto et al., Plant Cell Physiol., 35:773-778 (1994)), the Cab-1 promoter from wheat (Fejes et al., Plant Mol. Biol., 15:921-932 (1990)), the CAB-1 promoter from spinach (Lubberstedt et al., Plant Physiol., 104:997-1006 (1994)), the cab1R promoter from rice (Luan et al., Plant Cell, 4:971-981 (1992)), the pyruvate orthophosphate dikinase (PPDK) promoter from corn (Matsuoka et al., Proc. Natl. Acad. Sci. USA, 90:9586-9590 (1993)), the tobacco Lhcb1*2 promoter (Cerdan et al., Plant Mol. Biol., 33:245-255 (1997)), the Arabidopsis thaliana SUC2 sucrose-H+ symporter promoter (Truernit et al., Planta, 196:564-570 (1995)), and thylakoid membrane protein promoters from spinach (psaD, psaF, psaE, PC, FNR, atpC, atpD, cab, rbcS). Other photosynthetic tissue promoters include PT0535, PT0668, PT0886, YP0144, YP0380 and PT0585.

[0147] viii. Vascular Tissue Promoters

[0148] Examples of promoters that have high or preferential activity in vascular bundles include YP0087, YP0093, YP0108, YP0022, and YP0080. Other vascular tissue-preferential promoters include the glycine-rich cell wall protein GRP 1.8 promoter (Keller and Baumgartner, Plant Cell, 3(10):1051-1061 (1991)), the Commelina yellow mottle virus (CoYMV) promoter (Medberry et al., Plant Cell, 4(2):185-192 (1992)), and the rice tungro bacilliform virus (RTBV) promoter (Dai et al., Proc. Natl. Acad. Sci. USA, 101(2):687-692 (2004)).

[0149] ix. Inducible Promoters

[0150] Inducible promoters confer transcription in response to external stimuli such as chemical agents or environmental stimuli. For example, inducible promoters can confer transcription in response to hormones such as giberellic acid or ethylene, or in response to light or drought. Examples of drought-inducible promoters include YP0380, PT0848, YP0381, YP0337, PT0633, YP0374, PT0710, YP0356, YP0385, YP0396, YP0388, YP0384, PT0688, YP0286, YP0377, PD1367, and PD0901. Examples of nitrogen-inducible promoters include PT0863, PT0829, PT0665, and PT0886. Examples of shade-inducible promoters include PR0924 and PT0678. An example of a promoter induced by salt is rd29A (Kasuga et al. (1999) Nature Biotech 17: 287-291).

[0151] x. Basal Promoters

[0152] A basal promoter is the minimal sequence necessary for assembly of a transcription complex required for transcription initiation. Basal promoters frequently include a “TATA box” element that may be located between about 15 and about 35 nucleotides upstream from the site of transcription initiation. Basal promoters also may include a “CCAAT box” element (typically the sequence CCAAT) and/or a GGGCG sequence, which can be located between about 40 and about 200 nucleotides, typically about 60 to about 120 nucleotides, upstream from the transcription start site.

[0153] xi. Other Promoters

[0154] Other classes of promoters include, but are not limited to, shoot-preferential, callus-preferential, trichome cell-preferential, guard cell-preferential such as PT0678, tuber-preferential, parenchyma cell-preferential, and senescence-preferential promoters. Promoters designated YP0086, YP0188, YP0263, PT0758, PT0743, PT0829, YP0119, and YP0096, as described in the above-referenced patent applications, may also be useful.

[0155] xii. Other Regulatory Regions

[0156] A 5′ untranslated region (UTR) can be included in nucleic acid constructs described herein. A 5′ UTR is transcribed, but is not translated, and lies between the start site of the transcript and the translation initiation codon and may include the +1 nucleotide. A 3′ UTR can be positioned between the translation termination codon and the end of the transcript. UTRs can have particular functions such as increasing mRNA stability or attenuating translation. Examples of 3′ UTRs include, but are not limited to, polyadenylation signals and transcription termination sequences, e.g., a nopaline synthase termination sequence.

[0157] It will be understood that more than one regulatory region may be present in a recombinant polynucleotide, e.g., introns, enhancers, upstream activation regions, transcription terminators, and inducible elements. Thus, for example, more than one regulatory region can be operably linked to the sequence of a polynucleotide encoding an oxidative stress tolerance modulating polypeptide.

[0158] Regulatory regions, such as promoters for endogenous genes, can be obtained by chemical synthesis or by subcloning from a genomic DNA that includes such a regulatory region. A nucleic acid comprising such a regulatory region can also include flanking sequences that contain restriction enzyme sites that facilitate subsequent manipulation.

[0159] Alternatively, misexpression can be accomplished using a two component system, whereby the first component consists of a transgenic plant comprising a transcriptional activator operatively linked to a promoter and the second component consists of a transgenic plant that comprise a nucleic acid molecule of the invention operatively linked to the target-binding sequence/region of the transcriptional activator. The two transgenic plants are crossed and the nucleic acid molecule of the invention is expressed in the progeny of the plant. In another alternative embodiment of the present invention, the misexpression can be accomplished by having the sequences of the two component system transformed in one transgenic plant line.

### IV. TRANSGENIC PLANTS AND PLANT CELLS

[0160] A. Transformation

[0161] The invention also features transgenic plant cells and plants comprising at least one recombinant nucleic acid construct described herein. A plant or plant cell can be transformed by having a construct integrated into its genome, i.e., can be stably transformed. Stably transformed cells typically retain the introduced nucleic acid with each cell division. A plant or plant cell can also be transiently transformed such that the construct is not integrated into its genome. Transiently transformed cells typically lose all or some portion of the introduced nucleic acid construct with each cell division such that the introduced nucleic acid cannot be detected in daughter cells after a sufficient number of cell divisions. Both transiently transformed and stably transformed transgenic plants and plant cells can be useful in the methods described herein.

[0162] Transgenic plant cells used in methods described herein can constitute part or all of a whole plant. Such plants can be grown in a manner suitable for the species under consideration, either in a growth chamber, a greenhouse, or in a field. Transgenic plants can be bred as desired for a particular purpose, e.g., to introduce a recombinant nucleic acid into other lines, to transfer a recombinant nucleic acid to other species, or for further selection of other desirable traits. Alternatively, transgenic plants can be propagated vegetatively for those species amenable to such techniques. As used herein, a transgenic plant also refers to progeny of an initial transgenic plant having the transgene. Seeds produced by a transgenic plant can be grown and then selfed (or outcrossed and selfed) to obtain seeds homozygous for the nucleic acid construct.

[0163] Transgenic plants can be grown in suspension culture, or tissue or organ culture. For the purposes of this invention, solid and/or liquid tissue culture techniques can be used. When using solid medium, transgenic plant cells can be placed directly onto the medium or can be placed onto a filter that is then placed in contact with the medium. When using liquid medium, transgenic plant cells can be placed onto a flotation device, e.g., a porous membrane that contacts the liquid medium. A solid medium can be, for example, Murashige and Skoog (MS) medium containing agar and a suitable concentration of an auxin, e.g., 2,4-dichlorophenoxyacetic acid (2,4-D), and a suitable concentration of a cytokinin, e.g., kinetin.

[0164] When transiently transformed plant cells are used, a reporter sequence encoding a reporter polypeptide having a reporter activity can be included in the transformation procedure and an assay for reporter activity or expression can be performed at a suitable time after transformation. A suitable time for conducting the assay typically is about 1-21 days after transformation, e.g., about 1-14 days, about 1-7 days, or about 1-3 days. The use of transient assays is particularly convenient for rapid analysis in different species, or to confirm expression of a heterologous oxidative stress tolerance-modulating polypeptide whose expression has not previously been confirmed in particular recipient cells.

[0165] Techniques for introducing nucleic acids into monocotyledonous and dicotyledonous plants are known in the art, and include, without limitation, Agrobacterium-mediated transformation, viral vector-mediated transformation, electroporation and particle gun transformation, e.g., U.S. Pat. Nos. 5,538,880; 5,204,253; 6,329,571 and 6,013,863. If a cell or cultured tissue is used as the recipient tissue for transformation, plants can be regenerated from transformed cultures if desired, by techniques known to those skilled in the art.

[0166] B. Screening/Selection

[0167] A population of transgenic plants can be screened and/or selected for those members of the population that have a trait or phenotype conferred by expression of the transgene. For example, a population of progeny of a single transformation event can be screened for those plants having a desired level of expression of an oxidative stress tolerance-modulating polypeptide or nucleic acid. Physical and biochemical methods can be used to identify expression levels. These include Southern analysis or PCR amplification for detection of a polynucleotide; Northern blots, S1 RNase protection, primer-extension, or RT-PCR amplification for detecting RNA transcripts; enzymatic assays for detecting enzyme or ribozyme activity of polypeptides and polynucleotides; and protein gel electrophoresis, Western blots, immunoprecipitation, and enzyme-linked immunoassays to detect polypeptides. Other techniques such as in situ hybridization, enzyme staining, and immunostaining also can be used to detect the presence or expression of polypeptides and/or polynucleotides. Methods for performing all of the referenced techniques are known. As an alternative, a population of plants comprising independent transformation events can be screened for those plants having a desired trait, such as a modulated level of oxidative stress tolerance. Selection and/or screening can be carried out over one or more generations, and/or in more than one geographic location. In some cases, transgenic plants can be grown and selected under conditions which induce a desired phenotype or are otherwise necessary to produce a desired phenotype in a transgenic plant. In addition, selection and/or screening can be applied during a particular developmental stage in which the phenotype is expected to be exhibited by the plant. Selection and/or screening can be carried out to choose those transgenic plants having a statistically significant difference in an oxidative stress tolerance level relative to a control plant that lacks the transgene. Selected or screened transgenic plants have an altered phenotype as compared to a corresponding control plant, as described in the “Transgenic Plant Phenotypes” section herein.

[0168] A population of transgenic plants can be screened and/or selected for those members of the population that have a trait or phenotype conferred by expression of the transgene. For example, a population of progeny of a single transformation event can be screened for those plants having a desired level of expression of an tolerance-modulating polypeptide and/or nucleic acid. Physical and biochemical methods can be used to identify expression levels. These include Southern analysis or PCR amplification for detection of a polynucleotide; Northern blots, S1 RNase protection, primer-extension, or RT-PCR amplification for detecting RNA transcripts; enzymatic assays for detecting enzyme or ribozyme activity of polypeptides and polynucleotides; and protein gel electrophoresis, Western blots, immunoprecipitation, and enzyme-linked immunoassays to detect polypeptides. Other techniques such as in situ hybridization, enzyme staining, and immunostaining also can be used to detect the presence or expression of polypeptides and/or polynucleotides. Methods for performing all of the referenced techniques are known. As an alternative, a population of plants comprising independent transformation events can be screened for those plants having a desired trait, such as a modulated level of oxidative stress tolerance. Selection and/or screening can be carried out over one or more generations, and/or in more than one geographic location. In some cases, transgenic plants can be grown and selected under conditions which induce a desired phenotype or are otherwise necessary to produce a desired phenotype in a transgenic plant. In addition, selection and/or screening can be applied during a particular developmental stage in which the phenotype is expected to be exhibited by the plant. Selection and/or screening can be carried out to choose those transgenic plants having a statistically significant difference in an oxidative stress tolerance level relative to a control plant that lacks the transgene. Selected or screened transgenic plants have an altered phenotype as compared to a corresponding control plant, as described in the “Transgenic Plant Phenotypes” section herein.

[0169] C. Plant Species

[0170] The polynucleotides and vectors described herein can be used to transform a number of monocotyledonous and dicotyledonous plants and plant cell systems, including species from one of the following families: Acanthaceae, Alliaceae, Alstroemeriaceae, Amaryllidaceae, Apocynaceae, Arecaceae, Asteraceae, Berberidaceae, Bixaceae, Brassicaceae, Bromeliaceae, Cannabaceae, Caryophyllaceae, Cephalotaxaceae, Chenopodiaceae, Colchicaceae, Cucurbitaceae, Dioscoreaceae, Ephedraceae, Erythroxylaceae, Euphorbiaceae, Fabaceae, Lamiaceae, Linaceae, Lycopodiaceae, Malvaceae, Melanthiaceae, Musaceae, Myrtaceae, Nyssaceae, Papaveraceae, Pinaceae, Plantaginaceae, Poaceae, Rosaceae, Rubiaceae, Salicaceae, Sapindaceae, Solanaceae, Taxaceae, Theaceae, or Vitaceae.

[0171] Suitable species may include members of the genus Abelmoschus, Abies, Acer, Agrostis, Allium, Alstroemeria, Ananas, Andrographis, Andropogon, Artemisia, Arundo, Atropa, Berberis, Beta, Bixa, Brassica, Calendula, Camellia, Camptotheca, Cannabis, Capsicum, Carthamus, Catharanthus, Cephalotaxus, Chrysanthemum, Cinchona, Citrullus, Coffea, Colchicum, Coleus, Cucumis, Cucurbita, Cynodon, Datura, Dianthus, Digitalis, Dioscorea, Elaeis, Ephedra, Erianthus, Erythroxylum, Eucalyptus, Festuca, Fragaria, Galanthus, Glycine, Gossypium, Helianthus, Hevea, Hordeum, Hyoscyamus, Jatropha, Lactuca, Linum, Lolium, Lupinus, Lycopersicon, Lycopodium, Manihot, Medicago, Mentha, Miscanthus, Musa, Nicotiana, Oryza, Panicum, Papaver, Parthenium, Pennisetum, Petunia, Phalaris, Phleum, Pinus, Poa, Poinsettia, Populus, Rauwolfia, Ricinus, Rosa, Saccharum, Salix, Sanguinaria, Scopolia, Secale, Solanum, Sorghum, Spartina, Spinacea, Tanacetum, Taxus, Theobroma, Triticosecale, Triticum, Uniola, Veratrum, Vinca, Vitis, and Zea.

[0172] Suitable species include Panicum spp., Sorghum spp., Miscanthus spp., Saccharum spp., Erianthus spp., Populus spp., Andropogon gerardii (big bluestem), Pennisetum purpureum (elephant grass), Phalaris arundinacea (reed canarygrass), Cynodon dactylon (bermudagrass), Festuca arundinacea (tall fescue), Spartina pectinata(prairie cord-grass), Medicago sativa (alfalfa), Arundo donax (giant reed), Secale cereale (rye), Salix spp. (willow), Eucalyptus spp. (eucalyptus), Triticosecale (triticum—wheat X rye) and bamboo.

[0173] Suitable species also include Helianthus annuus (sunflower), Carthamus tinctorius (safflower), Jatropha curcas (jatropha), Ricinus communis (castor), Elaeis guineensis (palm), Linum usitatissimum (flax), and Brassica juncea.

[0174] Suitable species also include Beta vulgaris (sugarbeet), and Manihot esculenta (cassava).

[0175] Suitable species also include Lycopersicon esculentum (tomato), Lactuca sativa (lettuce), Musa paradisiaca (banana), Solanum tuberosum (potato), Brassica oleracea (broccoli, cauliflower, brusselsprouts), Camellia sinensis (tea), Fragaria ananassa(strawberry), Theobroma cacao (cocoa), Coffea arabica (coffee), Vitis vinifera (grape), Ananas comosus (pineapple), Capsicum annum (hot & sweet pepper), Allium cepa (onion), Cucumis melo (melon), Cucumis sativus (cucumber), Cucurbita maxima (squash), Cucurbita moschata (squash), Spinacea oleracea (spinach), Citrullus lanatus (watermelon), Abelmoschus esculentus (okra), and Solanum melongena (eggplant).

[0176] Suitable species also include Papaver somniferum (opium poppy), Papaver orientale, Taxus baccata, Taxus brevifolia, Artemisia annua, Cannabis sativa, Camptotheca acuminate, Catharanthus roseus, Vinca rosea, Cinchona officinalis, Colchicum autumnale, Veratrum californica., Digitalis lanata, Digitalis purpurea, Dioscorea spp., Andrographis paniculata, Atropa belladonna, Datura stomonium, Berberis spp., Cephalotaxus spp., Ephedra sinica, Ephedra spp., Erythroxylum coca, Galanthus wornorii, Scopolia spp., Lycopodium serratum (=Huperzia serrata), Lycopodium spp., Rauwolfia serpentina, Rauwolfia spp., Sanguinaria canadensis, Hyoscyamus spp., Calendula officinalis, Chrysanthemum parthenium, Coleus forskohlii, and Tanacetum parthenium.

[0177] Suitable species also include Parthenium argentatum (guayule), Hevea spp. (rubber), Mentha spicata (mint), Mentha piperita (mint), Bixa orellana, and Alstroemeria spp.

[0178] Suitable species also include Rosa spp. (rose), Dianthus caryophyllus (carnation), Petunia spp. (petunia) and Poinsettia pulcherrima (poinsettia).

[0179] Suitable species also include Nicotiana tabacum (tobacco), Lupinus albus (lupin), Uniola paniculata (oats), bentgrass (Agrostis spp.), Populus tremuloides (aspen), Pinus spp. (pine), Abies spp. (fir), Acer spp. (maple, Hordeum vulgare (barley), Poa pratensis (bluegrass), Lolium spp. (ryegrass) and Phleum pratense (timothy).

[0180] Thus, the methods and compositions can be used over a broad range of plant species, including species from the dicot genera Brassica, Carthamus, Glycine, Gossypium, Helianthus, Jatropha, Parthenium, Populus, and Ricinus; and the monocot genera Elaeis, Festuca, Hordeum, Lolium, Oryza, Panicum, Pennisetum, Phleum, Poa, Saccharum, Secale, Sorghum, Triticosecale, Triticum, and Zea. In some embodiments, a plant is a member of the species Panicum virgatum (switchgrass), Sorghum bicolor (sorghum, sudangrass), Miscanthus giganteus (miscanthus), Saccharum sp. (energycane), Populus balsamifera (poplar), Zea mays (corn), Glycine max (soybean), Brassica napus (canola), Triticum aestivum (wheat), Gossypium hirsutum (cotton), Oryza sativa (rice), Helianthus annuus (sunflower), Medicago sativa (alfalfa), Beta vulgaris (sugarbeet), or Pennisetum glaucum (pearl millet).

[0181] In certain embodiments, the polynucleotides and vectors described herein can be used to transform a number of monocotyledonous and dicotyledonous plants and plant cell systems, wherein such plants are hybrids of different species or varieties of a species (e.g., Saccharum sp.×Miscanthus sp.)

[0182] D. Transgenic Plant Phenotypes

[0183] In some embodiments, a plant in which expression of an oxidative stress modulating polypeptide is modulated can have increased levels of tolerance to oxidative stress. For example, an oxidative stress-modulating polypeptide described herein can be expressed in a transgenic plant, resulting in increased levels of tolerance to oxidative stress. The oxidative stress tolerance levels can be increased by at least 2 percent, e.g., 2, 3, 4, 5, 6, 7, 8, 9, 10, 11, 12, 13, 14, 15, 16, 17, 18, 19, 20, 25, 30, 35, 40, 45, 50, 55, 60, or more than 60 percent, as compared to those levels in a corresponding control plant that does not express the transgene.

[0184] The nucleic acid molecules and polypeptides of the present invention are of interest because when the nucleic acid molecules are mis-expressed (i.e., when expressed at a non-natural location or in an increased or decreased amount relative to wild-type) they produce plants that exhibit improved oxidation tolerance as compared to wild-type plants, as evidenced in part by the results of various experiments disclosed below. In particular, plants transformed with the nucleic acid molecules and polypeptides of the present invention can have any of a number of modified characteristics as compared to wild-type plants. Examples of modified characteristics include photosynthetic efficiency, seedling area, and biomass as it may be measured by plant height, leaf or rosette area, or dry mass. The modified characteristics may be observed and measured at different plant developmental stages, e.g. seed, seedling, bolting, senescense, etc. Often, oxidative stress tolerance can be expressed as ratios or combinations of measurements, such as salicylic acid growth index values. For example, plants transformed with the sequences of the present invention can exhibit increases in SGI, seedling area and/or SAGI values of at least 5%, at least 10%, at least 25%, at least 50%, at least 75%, at least 100%, at least 200%, at least 300%, at least 400%, or even at least 500%. These traits can be used to exploit or maximize plant products. For example, the nucleic acid molecules and polypeptides of the present invention are used to increase the expression of genes that cause the plant to have improved biomass, growth rate and/or seedling vigor in oxidative conditions, in comparison to wild type plants under the same conditions.

[0185] Because the disclosed sequences and methods increase vegetative growth and growth rate in oxidative conditions, the disclosed methods can be used to enhance plant growth in plants grown in oxidative conditions. For example, plants of the present invention show, under oxidative conditions, increased photosynthetic efficiency and increased seedling area as compared to a plant of the same species that is not genetically modified for substantial vegetative growth. Examples of increases in biomass production include increases of at least 5%, at least 20%, or even at least 50%, when compared to an amount of biomass production by a wild-type plant of the same species under identical conditions.

[0186] Typically, a difference in the amount of tolerance to oxidative stress in a transgenic plant or cell relative to a control plant or cell is considered statistically significant at p≦0.05 with an appropriate parametric or non-parametric statistic, e.g., Chi-square test, Student's t-test, Mann-Whitney test, or F-test. In some embodiments, a difference in the amount of tolerance to oxidative stress is statistically significant at p<0.01, p<0.005, or p<0.001.

[0187] The phenotype of a transgenic plant is evaluated relative to a control plant. A plant is said “not to express” a polypeptide when the plant exhibits less than 10%, e.g., less than 9%, 8%, 7%, 6%, 5%, 4%, 3%, 2%, 1%, 0.5%, 0.1%, 0.01%, or 0.001%, of the amount of polypeptide or mRNA encoding the polypeptide exhibited by the plant of interest. Expression can be evaluated using methods including, for example, RT-PCR, Northern blots, S1 RNase protection, primer extensions, Western blots, protein gel electrophoresis, immunoprecipitation, enzyme-linked immunoassays, chip assays, and mass spectrometry. It should be noted that if a polypeptide is expressed under the control of a tissue-preferential or broadly expressing promoter, expression can be evaluated in the entire plant or in a selected tissue. Similarly, if a polypeptide is expressed at a particular time, e.g., at a particular time in development or upon induction, expression can be evaluated selectively at a desired time period.

### V. PLANT BREEDING

[0188] Genetic polymorphisms are discrete allelic sequence differences in a population. Typically, an allele that is present at 1% or greater is considered to be a genetic polymorphism. The discovery that polypeptides disclosed herein can modulate oxidative stress tolerance content is useful in plant breeding, because genetic polymorphisms exhibiting a degree of linkage with loci for such polypeptides are more likely to be correlated with variation in an oxidative stress tolerance trait. For example, genetic polymorphisms linked to the loci for such polypeptides are more likely to be useful in marker-assisted breeding programs to create lines having a desired modulation in the oxidative stress tolerance traits.

[0189] Thus, one aspect of the invention includes methods of identifying whether one or more genetic polymorphisms are associated with variation in an oxidative stress tolerance trait. Such methods involve determining whether genetic polymorphisms in a given population exhibit linkage with the locus for one of the polypeptides depicted in FIGS. 1 thru 6 and/or a functional homolog thereof, such as, but not limited to, those in the Sequence Listing. The correlation is measured between variation in the oxidative stress tolerance traits in plants of the population and the presence of the genetic polymorphism(s) in plants of the population, thereby identifying whether or not the genetic polymorphism(s) are associated with variation for the traits. If the presence of a particular allele is statistically significantly correlated with a desired modulation in the oxidative stress tolerance traits, the allele is associated with variation for one or both of the traits and is useful as a marker for one or more of the traits. If, on the other hand, the presence of a particular allele is not significantly correlated with the desired modulation, the allele is not associated with variation for one or more of the traits and is not useful as a marker.

[0190] Such methods are applicable to populations containing the naturally occurring endogenous polypeptide rather than an exogenous nucleic acid encoding the polypeptide, i.e., populations that are not transgenic for the exogenous nucleic acid. It will be appreciated, however, that populations suitable for use in the methods may contain a transgene for another, different trait, e.g., herbicide resistance.

[0191] Genetic polymorphisms that are useful in such methods include simple sequence repeats (SSRs, or microsatellites), rapid amplification of polymorphic DNA (RAPDs), single nucleotide polymorphisms (SNPs), amplified fragment length polymorphisms (AFLPs) and restriction fragment length polymorphisms (RFLPs). SSR polymorphisms can be identified, for example, by making sequence specific probes and amplifying template DNA from individuals in the population of interest by PCR. If the probes flank an SSR in the population, PCR products of different sizes will be produced. See, e.g., U.S. Pat. No. 5,766,847. Alternatively, SSR polymorphisms can be identified by using PCR product(s) as a probe against Southern blots from different individuals in the population. See, U. H. Refseth et al., (1997) Electrophoresis 18: 1519. The identification of RFLPs is discussed, for example, in Alonso-Blanco et al. (Methods in Molecular Biology, vol. 82, “Arabidopsis Protocols”, pp. 137-146, J. M. Martinez-Zapater and J. Salinas, eds., c. 1998 by Humana Press, Totowa, N.J.); Burr (“Mapping Genes with Recombinant Inbreds”, pp. 249-254, in Freeling, M. and V. Walbot (Ed.), The Maize Handbook, c. 1994 by Springer-Verlag New York, Inc.: New York, N.Y., USA; Berlin Germany; Burr et al. Genetics (1998) 118: 519; and Gardiner, J. et al., (1993) Genetics 134: 917). The identification of AFLPs is discussed, for example, in EP 0 534 858 and U.S. Pat. No. 5,878,215.

[0192] In some embodiments, the methods are directed to breeding a plant line. Such methods use genetic polymorphisms identified as described above in a marker assisted breeding program to facilitate the development of lines that have a desired alteration in the oxidative stress tolerance trait(s). Once a suitable genetic polymorphism is identified as being associated with variation for the trait, one or more individual plants are identified that possess the polymorphic allele correlated with the desired variation. Those plants are then used in a breeding program to combine the polymorphic allele with a plurality of other alleles at other loci that are correlated with the desired variation. Techniques suitable for use in a plant breeding program are known in the art and include, without limitation, backcrossing, mass selection, pedigree breeding, bulk selection, crossing to another population and recurrent selection. These techniques can be used alone or in combination with one or more other techniques in a breeding program. Thus, each identified plants is selfed or crossed a different plant to produce seed which is then germinated to form progeny plants. At least one such progeny plant is then selfed or crossed with a different plant to form a subsequent progeny generation. The breeding program can repeat the steps of selfing or outcrossing for an additional 0 to 5 generations as appropriate in order to achieve the desired uniformity and stability in the resulting plant line, which retains the polymorphic allele. In most breeding programs, analysis for the particular polymorphic allele will be carried out in each generation, although analysis can be carried out in alternate generations if desired.

[0193] In some cases, selection for other useful traits is also carried out, e.g., selection for fungal resistance or bacterial resistance. Selection for such other traits can be carried out before, during or after identification of individual plants that possess the desired polymorphic allele.

### VI. ARTICLES OF MANUFACTURE

[0194] Transgenic plants provided herein have various uses in the agricultural and energy production industries. For example, transgenic plants described herein can be used to make animal feed and food products. Such plants, however, are often particularly useful as a feedstock for energy production.

[0195] Transgenic plants described herein often produce higher yields of grain and/or biomass per hectare, relative to control plants that lack the exogenous nucleic acid. In some embodiments, such transgenic plants provide equivalent or even increased yields of grain and/or biomass per hectare relative to control plants when grown under conditions of reduced inputs such as fertilizer and/or water. Thus, such transgenic plants can be used to provide yield stability at a lower input cost and/or under environmentally stressful conditions such as drought. In some embodiments, plants described herein have a composition that permits more efficient processing into free sugars, and subsequently ethanol, for energy production. In some embodiments, such plants provide higher yields of ethanol, butanol, other biofuel molecules, and/or sugar-derived co-products per kilogram of plant material, relative to control plants. By providing higher yields at an equivalent or even decreased cost of production relative to controls, the transgenic plants described herein improve profitability for farmers and processors as well as decrease costs to consumers.

[0196] Seeds from transgenic plants described herein can be conditioned and bagged in packaging material by means known in the art to form an article of manufacture. Packaging material such as paper and cloth are well known in the art. A package of seed can have a label, e.g., a tag or label secured to the packaging material, a label printed on the packaging material, or a label inserted within the package, that describes the nature of the seeds therein.

[0197] Enhanced oxidative stress tolerance gives the opportunity to grow crops in oxidative stress conditions without stunted growth and diminished yields due to ion imbalance, disruption of water homeostasis, inhibition of metabolism, damage to membranes, and/or cell death. The ability to grow plants in oxidative stress conditions would result in an overall expansion of arable land and increased output of land currently marginally productive due to elevated oxidative stress conditions.

[0198] Seed or seedling vigor is an important characteristic that can greatly influence successful growth of a plant, such as crop plants. Adverse environmental conditions, such as oxidative conditions, can affect a plant growth cycle, germination of seeds and seedling vigor (i.e. vitality and strength under such conditions can differentiate between successful and failed plant growth). Seedling vigor has often been defined to comprise the seed properties that determine “the potential for rapid, uniform emergence and development of normal seedlings under a wide range of field conditions”. Hence, it would be advantageous to develop plant seeds with increased vigor, particularly in oxidative stress conditions.

[0199] For example, increased seedling vigor would be advantageous for cereal plants such as rice, maize, wheat, etc. production. For these crops, germination and growth can often be slowed or stopped by oxidation. Genes associated with increased seed vigor under oxidative stress conditions have therefore been sought for producing improved plant varieties. (Walia et al. (2005) Plant Physiology 139:822-835).

[0200] The invention will be further described in the following examples, which do not limit the scope of the invention described in the claims.

### VII. EXAMPLES

### General Protocols

### Agrobacterium-Mediated Transformation of Arabidopsis

[0201] Host Plants and Transgenes: Wild-type Arabidopsis thaliana Wassilewskija (WS) plants are transformed with Ti plasmids containing nucleic acid sequences to be expressed, as noted in the respective examples, in the sense orientation relative to the 35S promoter in a Ti plasmid. A Ti plasmid vector useful for these constructs, CRS 338, contains the Ceres-constructed, plant selectable marker gene phosphinothricin acetyltransferase (PAT), which confers herbicide resistance to transformed plants.

[0202] Ten independently transformed events are typically selected and evaluated for their qualitative phenotype in the T₁ generation.

[0203] Preparation of Soil Mixture: 24 L Sunshine Mix #5 soil (Sun Gro Horticulture, Ltd., Bellevue, Wash.) is mixed with 16 L Therm-O-Rock vermiculite (Therm-O-Rock West, Inc., Chandler, Ariz.) in a cement mixer to make a 60:40 soil mixture. To the soil mixture is added 2 Tbsp Marathon 1% granules (Hummert, Earth City, Mo.), 3 Tbsp OSMOCOTE® 14-14-14 (Hummert, Earth City, Mo.) and 1 Tbsp Peters fertilizer 20-20-20 (J. R. Peters, Inc., Allentown, Pa.), which are first added to 3 gallons of water and then added to the soil and mixed thoroughly. Generally, 4-inch diameter pots are filled with soil mixture. Pots are then covered with 8-inch squares of nylon netting.

[0204] Planting: Using a 60 mL syringe, 35 mL of the seed mixture is aspirated. 25 drops are added to each pot. Clear propagation domes are placed on top of the pots that are then placed under 55% shade cloth and subirrigated by adding 1 inch of water.

[0205] Plant Maintenance: 3 to 4 days after planting, lids and shade cloth are removed. Plants are watered as needed. After 7-10 days, pots are thinned to 20 plants per pot using forceps. After 2 weeks, all plants are subirrigated with Peters fertilizer at a rate of 1 Tsp per gallon of water. When bolts are about 5-10 cm long, they are clipped between the first node and the base of stem to induce secondary bolts. Dipping infiltration is performed 6 to 7 days after clipping.

[0206] Preparation of Agrobacterium: To 150 mL fresh YEB is added 0.1 mL each of carbenicillin, spectinomycin and rifampicin (each at 100 mg/mL stock concentration). Agrobacterium starter blocks are obtained (96-well block with Agrobacterium cultures grown to an OD₆₀₀ of approximately 1.0) and inoculated one culture vessel per construct by transferring 1 mL from appropriate well in the starter block. Cultures are then incubated with shaking at 27° C. Cultures are spun down after attaining an OD₆₀₀ of approximately 1.0 (about 24 hours). 200 mL infiltration media is added to resuspend Agrobacterium pellets. Infiltration media is prepared by adding 2.2 g MS salts, 50 g sucrose, and 5 μL 2 mg/mL benzylaminopurine to 900 mL water.

[0207] Dipping Infiltration: The pots are inverted and submerged for 5 minutes so that the aerial portion of the plant is in the Agrobacterium suspension. Plants are allowed to grow normally and seed is collected.

[0208] High-throughput Phenotypic Screening of Misexpression Mutants: Seed is evenly dispersed into water-saturated soil in pots and placed into a dark 4° C. cooler for two nights to promote uniform germination. Pots are then removed from the cooler and covered with 55% shade cloth for 4-5 days. Cotyledons are fully expanded at this stage. FINALE® (Sanofi Aventis, Paris, France) is sprayed on plants (3 mL FINALE® diluted into 48 oz. water) and repeated every 3-4 days until only transformants remain.

[0209] Salicylic Acid Screening: Screening is routinely performed by agar plate assay using 100 μM or 150 μM exogenous sodium salicylate. Media contains ½×MS (Sigma), 150 μL1 M sodium salicylate (Sigma), 0.5 g MES hydrate (Sigma) and 0.7% phytagar (EM Science), adjusted to pH 5.7 using 10N KOH.

[0210] To screen superpools, seeds are surface sterilized in 30% bleach solution for 5 minutes and then rinsed repeatedly with sterile water. Approximately 2500 seeds are sown on media plates in a monolayer at a density of 850 seeds per plate, including wild-type and positive controls. Plates are wrapped with vent tape and placed at 4° C. in the dark for three days to stratify. At the end of this time, plates are transferred to a Conviron growth chamber set at 22° C., 16:8 hour light:dark cycle, 70% humidity with a combination of incandescent and fluorescent lamps emitting a light intensity of ˜100 μEinsteins.

[0211] Seedlings are screened daily starting at 6 days. Seedlings that grow larger and stay greener compared to WS control plants are selected as positive candidates and transferred to soil for recovery and seed set.

[0212] Candidate plants are re-screened by placing 36 seeds from each candidate together with a WS control on the same sodium salicylate plate. Plates are treated as described above and seedling screening begun after 4 days as described. Leaf tissue is harvested from confirmed tolerant candidates for DNA extraction and amplification of the transgene by PCR.

[0213] Alternatively, superpool seeds are sown directly on soil and sprayed with 10 mM SA. Leaf tissue is harvested from tolerant candidate plants to isolate DNA for PCR amplification of the transgene and subsequent sequencing of the PCR product.

[0214] Traits assessed under sodium salicylate conditions include: seedling area, photosynthesis efficiency, salicylic acid growth index (SAG) and regeneration ability.
[0215] Seedling area: the total leaf area of a young plant about 2 weeks old.
[0216] Photosynthesis efficiency (Fv/Fm): Seedling photosynthetic efficiency, or electron transport via photosystem II, is estimated by the relationship between Fm, the maximum fluorescence signal and the variable fluorescence, Fv. Here, a reduction in the optimum quantum yield (Fv/Fm) indicates stress, and so can be used to monitor the performance of transgenic plants compared to non-transgenic plants under oxidative stress conditions.
[0217] Salicylic Acid Growth (SAG) Index=seedling area (cm²)×photosynthesis efficiency (Fv/Fm).
   PCR was used to amplify the cDNA insert in one randomly chosen T₂ plant. This PCR product was then sequenced to confirm the sequence in the plants.

[0218] Assessing Tolerance to Oxidative Stress: Initially, between four and ten independently transformed plant lines are selected and qualitatively evaluated for their tolerance to SA in the T₂ generation. Two or three of the transformed lines that qualitatively show the strongest tolerance to oxidative stress in the T₂ generation are selected for further evaluation in the T₂ and T₃ generations. This evaluation involves sowing seeds from the selected transformed plant lines on MS agar plates containing 100 μM or 150 μM sodium salicylate and incubating the seeds for at least 4 days to allow for germination and growth.

[0219] Calculating SAG: After germination and growth, seedling area and photosynthesis efficiency of transformed lines and a wild-type control are determined. From these measurements, the Salicylic Acid Growth Index (SAG) is calculated and compared between wild-type and transformed seedlings. The SAG calculation is made by averaging seedling area and photosynthesis efficiency measurements taken from two replicates of 36 seedlings for each transformed line and a wild-type control and performing a t-test.

[0220] Determining Transgene Copy Number: T₂ generation transformed plants are tested on BASTA® plates in order to determine the transgene copy number of each transformed line. A BASTA® resistant:BASTA® sensitive segregation ratio of 15:1 generally indicates two copies of the transgene, and such a segregation ratio of 3:1 generally indicates one copy of the transgene.

[0221] L-Arginine Screening: Screening is routinely performed by agar plate assay using 10 mM L-arginine, pH 9. Media contains ½×MS (Sigma), 10 mM L-arginine (Sigma) and 0.8% phytagar (EM Science), adjusted to pH 9 using 10N KOH.

[0222] To screen superpools, seeds are surface sterilized in 30% bleach solution for 5 minutes and then rinsed repeatedly with sterile water. Approximately 2500 seeds are sown on media plates in a monolayer at a density of 850 seeds per plate, including wild-type and positive controls. Plates are wrapped with vent tape and placed at 4° C. in the dark for three days to stratify. At the end of this time, plates are transferred to a Conviron growth chamber set at 22° C., 16:8 hour light:dark cycle, 70% humidity with a combination of incandescent and fluorescent lamps emitting a light intensity of ˜100 μEinsteins.

[0223] Seedlings are screened daily starting at 5 days. Seedlings that grow larger and stay greener compared to WS control plants are selected as positive candidates and transferred to soil for recovery and seed set.

[0224] Candidate plants are re-screened by placing 36 seeds from each candidate together with a WS control on the same L-arginine plate. Plates are treated as described above and seedling screening begun after 5 days as described. Leaf tissue is harvested from confirmed tolerant candidates for DNA extraction, amplification of the transgene by PCR and sequencing of the PCR product.

[0225] Traits assessed under L-arginine conditions include: seedling area, photosynthesis efficiency and regeneration ability.
[0226] Seedling area: the total leaf area of a young plant about 2 weeks old.
[0227] Photosynthesis efficiency (Fv/Fm): Seedling photosynthetic efficiency, or electron transport via photosystem II, is estimated by the relationship between Fm, the maximum fluorescence signal and the variable fluorescence, Fv. Here, a reduction in the optimum quantum yield (Fv/Fm) indicates stress, and so can be used to monitor the performance of transgenic plants compared to non-transgenic plants under oxidative stress conditions.

[0228] PCR is used to amplify the cDNA insert in one randomly chosen T₂ plant. This PCR product is then sequenced to confirm the sequence in the plants.

[0229] Validation is performed as described above using 60 seeds of each event except that the media is supplemented with 0.5 g/l MES-hydrate (M8250-Sigma) and the pH adjusted to 5.7.

[0230] In some cases, validation is performed using media that is further supplemented with 100 uM SNP.

[0231] Determining Transgene Copy Number: T₂ generation transformed plants are tested on BASTA® plates in order to determine the transgene copy number of each transformed line.

### Results:

[0232] The following Examples provide information for polynucleotides and their encoded polypeptides useful for increasing tolerance to oxidative stress. Enhanced oxidative stress tolerance provides the opportunity to grow crops under oxidative stress conditions without stunted growth and diminished yields. The ability to grow crops under oxidative stress conditions would result in an overall expansion of arable land and increased output of land that is currently marginally productive.

### Example 1

### ME02077(Ceres cDNA 36505846; Clone 268310; SEQ ID No. 78)

| Trait area(s) | Abiotic Stress Tolerance |
|---|---|
| Sub-trait Area | Oxidative Stress Tolerance- Better growth under oxidative stress induced |
| | by salicylic acid where the growth of wild-type plants is dramatically |
| | inhibited. |
| Coding sequence/ | Vector construct sequence identifier 14301162 corresponds to Clone |
| Species of Origin | 268310 (cDNA 36505846) from Arabidopsis. The encoded protein |
| | has 301 amino acids, and shows similarity to an ethylene responsive |
| | element binding factor. |
| Species in which | Arabidopsis thaliana |
| Clone was Tested | |
| Promoter | 35S, a strong constitutive promoter |
| Insert DNA type | cDNA |
| Event/Seed ID | ME02077-02 and -03 |

[0234] Summary:

| Construct | Event/Generation | Plant Stage | Assay | Result |
|---|---|---|---|---|
| 35S::268310 | -02/T₂ Finale resistant plants | Seedling | Oxidative Stress | Significant at p ≦0.05 |
| 35S::268310 | -03/T₂ Finale resistant plants | Seedling | Oxidative Stress | Significant at p ≦0.05 |
| 35S::268310 | -02/T₃ Finale resistant plants | Seedling | Oxidative Stress | Significant at p ≦0.05 |
| 35S::268310 | -03/T₃ Finale resistant plants | Seedling | Oxidative Stress | Significant at p ≦0.05 |

[0235] Wild-type Arabidopsis thaliana Wassilewskija was transformed with a Ti plasmid carrying the 35S promoter operatively linked to Ceres Clone 268310 (SEQ ID No. 79). Wildtype Ws seedlings showed necrotic lesions and stunted growth on plates containing 100 or 150 μM SA, whereas the transgenic plants showed significantly better growth. The transgene encodes a 301-amino-acid protein that shows similarity to an ethylene responsive element binding factor. Segregation ratios (BASTA® resistant: BASTA® sensitive) indicated that ME02077-02 and ME02077-03 each contain one copy of the transgene.

[0236] Two transformed lines, ME02077-02 and ME02077-03, showed the strongest tolerance to oxidative stress. These lines were identified from a screen that assessed the growth of six independent events of ME02077 on MS agar plates containing 100 μM SA. After 14 days, plates were scanned using an EPSON color scanner or fluorescence scanner and SAG calculated for each plant. The data is summarized in FIG. 3, where a bar represents the average value+/−standard error of SAG for transgenic plants (T) or pooled non-transgenic plants. ME02077-02 and -03 showed significantly larger SAG values as compared to the pooled non-transgenic control based on t-test (α<0.05). Their tolerance to SA was further evaluated in a validation assay using the T₃ and T₃ generations.

[0237] When grown on MS agar plates containing 100 μM SA, ME02077-02 and -03 transgenic plants showed significantly increased seedling area and SAG relative to non-transgenic plants. As shown in Table 1-1 and FIGS. 1 and 2, the T₂ generation SAG value for ME02077-02 and ME02077-03 seedlings increased by 935.6% and 804%, respectively. In the T₃ generation, the SAG increase for ME02077-02 and ME02077-03 was 1937.4%, and 348.6%, respectively. The differences between transgenic and non-transgenic seedlings are statistically significant under the t-test, and clearly demonstrate that the enhanced tolerance to oxidative stress is a result of the ectopic expression of Ceres cDNA 36505846 in the ME02077 transformant lines.

TABLE 1-1
Validation assay of ME02077 on SA tolerance in two generations

| | SAG* of | | | SAG of pooled | | | | | % of |
|---|---|---|---|---|---|---|---|---|---|
| ME | transgenics | | | non-transgenics | | | t-Test | | SGI |
| Events | Avg | SE | N | Avg | SE | N | t-value | t_{0.05} | increase |
| ME02077- | 4.391 | 0.066 | 48 | 0.424 | 0.028 | 23 | 4.391 | 1.67 | 935.6% |
| 02T₂ | | | | | | | | | |
| ME02077- | 3.607 | 0.069 | 56 | 0.399 | 0.083 | 11 | 3.607 | 1.67 | 804.0% |
| 03T₂ | | | | | | | | | |
| ME02077- | 8.618 | 0.054 | 55 | 0.423 | 0.107 | 17 | 8.618 | 1.67 | 1937.4% |
| 02T₃ | | | | | | | | | |
| ME02077- | 2.965 | 0.050 | 56 | 0.661 | 0.153 | 14 | 2.965 | 1.67 | 348.6% |
| 03T₃ | | | | | | | | | |

*SAG (SA Growth Index) = seedling area × Fv/Fm (photosynthesis efficiency)

[0238] In sum, ectopic expression of Ceres Clone 36505846 under the control of the 35S promoter enhances tolerance to oxidative stress that causes necrotic lesions and stunted growth in wild-type WS seedlings.

### Example 2

### ME06123 (Ceres cDNA 23537050; Ceres Annot. ID 508432; Locus At4g35180; SEQ ID No. 93)

| Trait area(s) | Abiotic Stress Tolerance |
|---|---|
| Sub-trait Area | Oxidative Stress Tolerance- Better growth under oxidative stress induced |
| | by salicylic acid, where the growth of wild-type plants is dramatically |
| | inhibited. |
| Coding sequence/ | Vector construct sequence identifier 15217952 corresponding to At4g35180 |
| Species of Origin | from Arabidopsis thaliana encodes a 456 amino acid protein with similarity |
| | to an amino acid transporter. |
| Species in which | Arabidopsis |
| Clone was Tested | |
| Promoter | 35S, a strong constitutive promoter |
| Insert DNA type | Genomic DNA |
| Event/Seed ID | ME06123-01 and -06 |

[0240] Summary:

| Construct | Event/Generation | Plant Stage | Assay | Result |
|---|---|---|---|---|
| 35S::At4g35180 | -01/T₂ BASTA ® resistant plants | Seedling | Oxidative Stress | Significant at p ≦0.05 |
| 35S:: At4g35180 | -06/T₂ BASTA ® resistant plants | Seedling | Oxidative Stress | Significant at p ≦0.05 |
| 35S:: At4g35180 | -01/T₃ BASTA ® resistant plants | Seedling | Oxidative Stress | Significant at p ≦0.05 |
| 35S:: At4g35180 | -06/T₃ BASTA ® resistant plants | Seedling | Oxidative Stress | Significant at p ≦0.05 |

[0241] Wild-type Arabidopsis thaliana Wassilewskija was transformed with a Ti plasmid carrying the 35S promoter operatively linked to Ceres Annot. ID 508432 (SEQ ID No. 94). Wildtype Ws seedlings showed necrotic lesions and stunted growth on plates containing 100 or 150 μM SA, whereas the transgenic plants showed significantly better growth. The transgene encodes a 456-amino-acid protein that shows similarity to an amino acid transporter. Consequently, the mechanism of the SA tolerance in ME06123 likely involves the compartmentalization of the toxic molecule. Segregation ratios (BASTA® resistant: BASTA® sensitive) indicated that ME06123-01 and ME06123-03 each contain one copy of the transgene.

[0242] Two transformed lines, ME06123-01 and ME06123-06, showed the strongest tolerance to oxidative stress. These lines were identified from a screen that assessed the growth of four independent events of ME06123 on MS agar plates containing 150 μM SA. Their tolerance to SA was further evaluated in a validation assay using the T₂ and T₃ generations or the T₃ and T₄ generations.

[0243] When grown on MS agar plates containing 100 μM SA, ME06123-01 and ME06123-06 transgenic plants showed significantly increased seedling area and SAG relative to non-transgenic plants. As shown in Table 2-1 and FIG. 4, SAG value for the T₃ generation of ME06123-01 seedlings increased by 326.1% and by 459.9% for the T₂ generation of ME06123-06 seedlings. In the T₃ generation, the SAG increase for ME06123-01 increased was 40.4% while the T₄ generation of ME06123-06 increased by 76.9%. The differences between transgenic and non-transgenic seedlings are statistically significant under the t-test, and clearly demonstrate that the enhanced tolerance to oxidative stress is a result of the ectopic expression of Ceres cDNA 23537050 in the ME06123 transformant lines.

TABLE 2-1
Validation assay of ME06123 on SA tolerabce in two generations

| | | | | Seedling area of | | | | | |
|---|---|---|---|---|---|---|---|---|---|
| | Seedling area of | | | pooled non- | | | | | |
| | transgenics | | | transgenics | | | t-Test | | Increase |
| ME Events | Avg | SE | N | Avg | SE | N | t-value | t_{0.05} | (%) |
| ME06123-01T3 | 2.1003 | 0.1617 | 32 | 0.4929 | 0.0853 | 38 | 8.79 | 1.67 | 326.1 |
| ME06123-01T4 | 1.1675 | 0.0377 | 119 | 0.8316 | 0.0646 | 49 | 4.49 | 1.66 | 40.4 |
| ME06123-06T2 | 2.0343 | 0.1151 | 49 | 0.3633 | 0.0934 | 12 | 11.27 | 1.68 | 459.9 |
| ME06123-06T3 | 1.0403 | 0.0364 | 117 | 0.5880 | 0.0388 | 49 | 8.5 | 1.66 | 76.9 |

[0244] In sum, ectopic expression of Ceres cDNA 23537050 under the control of the 35S promoter enhances tolerance to oxidative stress that causes necrotic lesions and stunted growth in wild-type WS seedlings.

[0245] ME18881, an independent transgenic line with the same sequence as ME06123, was also tested and the results below obtained.

TABLE 2-2
Validation assay of ME18881 on SA tolerance in T2 generation

| | | | | Seedling Area of pooled Non- | | | | % of | |
|---|---|---|---|---|---|---|---|---|---|
| ME | Seedling Area of Transgenics | | | Transgenics | | | | Seedling_Area | |
| Events | Avg | SE | N | Avg | SE | N | P value | increase | Significant |
| ME18881-01 | 1.8 | 0.0938881 | 25 | 1.66 | 0.2136921 | 11 | 0.283902 | 108.09% | NO |
| ME18881-02 | 1.82 | 0.070997991 | 46 | 1.71 | 0.0869784 | 26 | 0.162538 | 106.51% | NO |
| ME18881-03 | 1.4 | 0.098119106 | 23 | 1.22 | 0.1710077 | 11 | 0.187489 | 114.54% | NO |
| ME18881-04 | 2.19 | 0.115731858 | 44 | 1.6 | 0.21028 | 28 | 0.008015 | 137.09% | YES |
| ME18881-05 | 1.39 | 0.189948027 | 20 | 1.41 | 0.1294273 | 16 | 0.461083 | 98.40% | NO |

### Example 3

### ME00922 (Ceres cDNA 23372643; Clone 41610; SEQ ID No. 101)

| Trait area(s) | Abiotic Stress Tolerance |
|---|---|
| Sub-trait Area | Oxidative Stress Tolerance- Better growth under oxidative stress induced |
| | by L-arginine, where the growth of wild-type plants is dramatically |
| | inhibited. |
| Coding sequence/ | Vector construct sequence identifier 21673279 corresponding to Locus |
| Species of Origin | At5g14260 from Arabidopsis thaliana encodes a 516 amino acid protein tha [symbol] |
| | contains a SET domain and is likely located in chloroplast. |
| Species in which | Arabidopsis thaliana |
| Clone was Tested | |
| Promoter | 32449, a strong constitutive promoter |
| Insert DNA type | cDNA |
| Event/Seed ID | ME00922-02, -03 and -05 |

[symbol]

indicates data missing or illegible when filed

[0247] Summary:

| | | Plant | | |
|---|---|---|---|---|
| Construct | Event/Generation | Stage | Assay | Result |
| 32449:: At5g14260 | -02/T₂ BASTA ® resistant | Seedling | Oxidative Stress | Significant at p ≦0.05 |
| | plants | | | |
| 32449:: At5g14260 | -03/T₂ BASTA ® resistant | Seedling | Oxidative Stress | Significant at p ≦0.05 |
| | plants | | | |
| 32449:: At5g14260 | -05/T₂ BASTA ® resistant | Seedling | Oxidative Stress | Significant at p ≦0.05 |
| | plants | | | |
| 32449:: At5g14260 | -02/T₃ BASTA ® resistant | Seedling | Oxidative Stress | Significant at p ≦0.05 |
| | plants | | | |
| 32449:: At5g14260 | -03/T₃ BASTA ® resistant | Seedling | Oxidative Stress | Significant at p ≦0.05 |
| | plants | | | |
| 32449:: At5g14260 | -05/T₃ BASTA ® resistant | Seedling | Oxidative Stress | Significant at p ≦0.05 |
| | plants | | | |

[0248] Wild-type Arabidopsis thaliana Wassilewskija was transformed with a Ti plasmid carrying the 32449 promoter operatively linked to Ceres cDNA 23372643 (SEQ ID No. 102). Wildtype Ws seedlings showed necrotic lesions and stunted growth on plates containing 10 mM L-arginine, whereas the transgenic plants showed significantly better growth. The transgene encodes a 516 amino-acid protein that contains a SET domain, which has been implicated in transcriptional regulation via histone methylation (Springer et al. 2003). Three transformed lines, ME00922-O₂, ME00922-03 and ME00922-05, showed the strongest qualitative tolerance to oxidative stress in a prevalidation assay. Their tolerance to 10 mM L-arginine was further evaluated in a validation assay for two generations. Segregation ratios (BASTA® resistant: BASTA® sensitive) indicated that ME00922-O₂, ME00922-03 and ME00922-05 each contain one copy of the transgene.

[0249] When grown on MS agar plates containing 10 mM L-arginine, ME00922-02, ME00922-03 and ME00922-05 transgenic plants showed significantly increased seedling area relative to non-transgenic plants. As shown in Table 3-1 and FIG. 6, the T₂ generation value for ME00922-02, ME00922-03 and ME00922-05 seedlings increased by 108.76%, 89.75% and 66.89%, respectively. In the T₃ generation, three events for each line were tested. Here the greatest increase for ME00922-02, ME00922-03 and ME00922-05 was 29.68%, 43.95% and 81.39%, respectively. The differences between transgenic and non-transgenic seedlings are statistically significant under the t-test, and clearly demonstrate that the enhanced tolerance to oxidative stress is a result of the ectopic expression of Ceres cDNA 23372643 in the ME00922 transformant lines.

TABLE 3-1
Validation assay of ME00922 on Arginine tolerance in two generations

| | | | | Seedling area of | | | | | |
|---|---|---|---|---|---|---|---|---|---|
| | Seedling area of | | | pooled non- | | | | | |
| | transgenics | | | transgenics | | | t-Test | | Increase |
| ME Events | Avg | SE | N | Avg | SE | N | t-value | t_{0.05} | (%) |
| ME00922- | 1.544 | 0.073 | 37 | 0.739 | 0.082 | 31 | 7.33 | 1.67 | 108.76% |
| 02T₂ | | | | | | | | | |
| ME00922- | 1.457 | 0.106 | 24 | 0.768 | 0.089 | 47 | 4.99 | 1.67 | 89.75% |
| 03T₂ | | | | | | | | | |
| ME00922- | 1.491 | 0.086 | 35 | 0.893 | 0.095 | 36 | 4.66 | 1.67 | 66.89% |
| 05T₂ | | | | | | | | | |
| ME00922- | 4.423 | 0.394 | 23 | 3.411 | 0.509 | 12 | 1.57 | 1.7 | 29.68% |
| 02-01T₃ | | | | | | | | | |
| ME00922- | 4.287 | 0.431 | 17 | 4.099 | 0.530 | 18 | 0.27 | 1.7 | 4.58% |
| 02-02T₃ | | | | | | | | | |
| ME00922- | 4.187 | 0.265 | 33 | 3.435 | 0.289 | 34 | 1.92 | 1.67 | 21.89% |
| 02-03T₃ | | | | | | | | | |
| ME00922- | 4.770 | 0.206 | 51 | 3.314 | 0.472 | 15 | 2.83 | 1.67 | 43.95% |
| 03-01T₃ | | | | | | | | | |
| ME00922- | 4.555 | 0.281 | 39 | 3.544 | 0.395 | 30 | 2.09 | 1.67 | 28.54% |
| 03-02T₃ | | | | | | | | | |
| ME00922- | 5.508 | 0.266 | 41 | 4.437 | 0.374 | 23 | 2.33 | 1.67 | 24.15% |
| 03-03T₃ | | | | | | | | | |
| ME00922- | 4.934 | 0.261 | 37 | 4.549 | 0.295 | 31 | 0.98 | 1.67 | 8.45% |
| 05-01T₃ | | | | | | | | | |
| ME00922- | 4.561 | 0.257 | 34 | 3.450 | 0.304 | 33 | 2.79 | 1.67 | 32.20% |
| 05-02T₃ | | | | | | | | | |
| ME00922- | 4.845 | 0.198 | 48 | 2.671 | 0.363 | 18 | 5.26 | 1.67 | 81.39% |
| 05-03T₃ | | | | | | | | | |

[0250] T₃ lines of ME00922 were also tested for oxidative stress tolerance on growth media supplemented with 100 μM SNP. Here, five individual lines derived from ME00922-03 and ME00922-04 showed significantly increased seedling area relative to non-transgenic plants. As shown in FIG. 7 and Table 3-2, the T₃ generation value for ME00922-03-01, -02 and -03 seedlings increased by 20.95%, 26.98% and 43.51%, respectively. The increase for ME00922-04-01 and -03 seedlings was 26.96% and 102.32%, respectively. Again, the differences between transgenic and non-transgenic seedlings are statistically significant under the t-test, and clearly demonstrate that the enhanced tolerance to oxidative stress is a result of the ectopic expression of Ceres cDNA 23372643 in the ME00922 transformant lines.

TABLE 3-2
Analysis of SNP-induced NO tolerance in ME00922 T₃ lines

| | | | | Seedling area of | | | | | |
|---|---|---|---|---|---|---|---|---|---|
| | Seedling area of | | | pooled non- | | | | | |
| | transgenics | | | transgenics | | | t-Test | | Increase |
| ME Events | Avg | SE | N | Avg | SE | N | t-value | t_{0.05} | (%) |
| ME00922- | 5.257 | 0.528 | 23 | 4.347 | 0.421 | 32 | 1.35 | 1.68 | 20.95% |
| 03-01 | | | | | | | | | |
| ME00922- | 5.474 | 0.682 | 14 | 4.311 | 0.550 | 19 | 1.33 | 1.7 | 26.98% |
| 03-02 | | | | | | | | | |
| ME00922- | 5.910 | 0.526 | 25 | 4.118 | 0.699 | 10 | 2.05 | 1.7 | 43.51% |
| 03-03 | | | | | | | | | |
| ME00922- | 5.271 | 0.326 | 21 | 4.152 | 0.461 | 15 | 1.98 | 1.7 | 26.96% |
| 05-01 | | | | | | | | | |
| ME00922- | 5.007 | 0.359 | 20 | 5.006 | 0.410 | 16 | 0.00 | 1.7 | 0.01% |
| 05-02 | | | | | | | | | |
| ME00922- | 3.379 | 0.317 | 30 | 1.670 | 0.365 | 6 | 3.53 | 1.7 | 102.32% |
| 05-03 | | | | | | | | | |

[0251] In sum, ectopic expression of Ceres cDNA 23372643 under the control of the 32449

TABLE 3-3
Validation assay of ME22365 on arginine tolerance in T2 generation

| | | | | SGI of pooled non- | | | | | |
|---|---|---|---|---|---|---|---|---|---|
| ME | SGI* of transgenics | | | transgenics | | | | | |
| Events | Avg | SE | N | Avg | SE | N | P value | % of SGI increase | Significant |
| ME22365-01 | 4.736051 | 0.285261 | 15 | 2.792861 | 0.463362 | 21 | 5.43E−04 | 169.58% | YES |
| ME22365-02 | 2.757845 | 0.257909 | 17 | 1.775044 | 0.308109 | 19 | 9.89E−03 | 155.37% | YES |
| ME22365-04 | 3.194649 | 0.301214 | 14 | 2.216874 | 0.297595 | 21 | 1.37E−02 | 144.11% | YES |
| ME22365-05 | 2.935965 | 0.240971 | 15 | 1.986859 | 0.293136 | 21 | 8.68E−03 | 147.77% | YES |

*AGI (Arginine Growth Index) = seedling area × Fv/Fm (photosynthesis efficiency) promoter enhances tolerance to oxdiative stress that causes necrotic lesions and stunted growth in wild-type WS seedlings.

[0252] An ortholog of ME00922, ME22365, was also tested, providing the results below.

### Example 4

### ME12485 (Ceres cDNA 23527804; Ceres Annot. 544535; Locus At1g26710; SEQ ID No. 107)

| Trait area(s) | Abiotic Stress Tolerance |
|---|---|
| Sub-trait Area | Oxidative Stress Tolerance- Better growth under high salicylic acid |
| | conditions where the growth of wild-type plants is dramatically inhibited. |
| Coding sequence/ | Vector Construct Sequence Identifier 24779187 corresponding to |
| Species of Origin | At1g26710 from Arabidopsis thaliana encodes a 168 amino acid |
| | unknown protein. |
| Species in which | Arabidopsis thaliana |
| Clone was Tested | |
| Promoter | 35S, a strong constitutive promoter |
| Insert DNA type | Genomic |
| Event/Seed ID | ME12485-05, -06 and -08 |

[0254] Summary:

| Construct | Event/Generation | Plant Stage | Assay | Result |
|---|---|---|---|---|
| 35S::At1g26710 | -05/T₂ segregating plants | Seedling | Oxidative Stress | Significant at p ≦0.05 |
| 35S::At1g26710 | -08/T₂ segregating plants | Seedling | Oxidative Stress | Significant at p ≦0.05 |
| 35S::At1g26710 | -05/T₃ segregating plants | Seedling | Oxidative Stress | Significant at p ≦0.05 |
| 35S::At1g26710 | -08/T₃ segregating plants | Seedling | Oxidative Stress | Significant at p ≦0.05 |

[0255] Wild-type Arabidopsis thaliana Wassilewskija was transformed with a Ti plasmid carrying the CaMV 35S promoter operatively linked to Ceres Annot. ID 544535 (SEQ ID No. 107). Wildtype Ws seedlings showed necrotic lesions and stunted growth on plates containing 100 μM SA, whereas the transgenic plants showed significantly better growth. The transgene encodes a 168 amino acid protein of unknown function. Three transformed lines, ME12485-05, ME12485-08 and ME12485-09, showed the strongest qualitative tolerance to oxidative stress in a prevalidation assay. Their tolerance to 100 μM SA was further evaluated in a validation assay for two generations. Segregation ratios (BASTA® resistant: BASTA® sensitive) indicated that ME12485-05, ME12485-08 and ME12485-09 each contain at least one copy of the transgene.

[0256] When grown on MS agar plates containing 100 μM SA, ME12485-05, ME12485-08 and ME12485-09 transgenic plants showed significantly increased seedling area relative to non-transgenic plants. As shown in Table 4-1 and FIG. 9′, the T₂ generation value for ME12485-05, ME12485-08 and ME12485-09 seedlings increased by 64.96%, 86.32% and 59.83%, respectively. In the T₃ generation, the increase for ME12485-05, ME12485-08 and ME12485-09 was 23.55%, 37.36% and 19.77%, respectively. The differences between transgenic and non-transgenic seedlings are statistically significant under the t-test except one line in T₃ generation (ME12485-09-02T₃), and clearly demonstrate that the enhanced tolerance to oxidative stress is a result of the ectopic expression of Ceres cDNA 23524804 in the ME12485 transformant lines.

TABLE 4
Validation assay of ME12485 on SA tolerance in two generations

| | Seedling area of | | | Seedling area of pooled | | | | | Avg. |
|---|---|---|---|---|---|---|---|---|---|
| | transgenics | | | non-transgenics | | | t-Test | | increase |
| ME Events | Avg | SE | N | Avg | SE | N | t-stat | t_{0.05} | % |
| ME12485-05T₂ | 0.868 | 0.101 | 41 | 0.526 | 0.089 | 11 | 2.54 | 1.68 | 64.96% |
| ME12485-08T₂ | 0.874 | 0.092 | 36 | 0.469 | 0.124 | 15 | 2.62 | 1.68 | 86.32% |
| ME12485-09T₂ | 1.305 | 0.150 | 17 | 0.816 | 0.157 | 19 | 2.25 | 1.7 | 59.83% |
| ME12485-05-04T₃ | 0.855 | 0.045 | 42 | 0.692 | 0.077 | 30 | 1.84 | 1.67 | 23.55% |
| ME12485-08-01T₃ | 0.852 | 0.049 | 37 | 0.621 | 0.059 | 34 | 3.03 | 1.67 | 37.36% |
| ME12485-09-02T₃ | 0.683 | 0.052 | 47 | 0.570 | 0.076 | 23 | 1.22 | 1.67 | 19.77% |

[0257] In sum, ectopic expression of Ceres cDNA 23524804 under the control of the CaMV 35S promoter enhances tolerance to oxidative stress that causes necrotic lesions and stunted growth in wild-type WS seedlings.

### Example 5

### Determination of Functional Homologs by Reciprocal BLAST

[0258] A candidate sequence was considered a functional homolog of a reference sequence if the candidate and reference sequences encoded proteins having a similar function and/or activity. A process known as Reciprocal BLAST (Rivera et al., Proc. Natl. Acad. Sci. USA, 95:6239-6244 (1998)) was used to identify potential functional homolog sequences from databases consisting of all available public and proprietary peptide sequences, including NR from NCBI and peptide translations from Ceres clones.

[0259] Before starting a Reciprocal BLAST process, a specific reference polypeptide was searched against all peptides from its source species using BLAST in order to identify polypeptides having BLAST sequence identity of 80% or greater to the reference polypeptide and an alignment length of 85% or greater along the shorter sequence in the alignment. The reference polypeptide and any of the aforementioned identified polypeptides were designated as a cluster.

[0260] The BLASTP version 2.0 program from Washington University at Saint Louis, Mo., USA was used to determine BLAST sequence identity and E-value. The BLASTP version 2.0 program includes the following parameters: 1) an E-value cutoff of 1.0e-5; 2) a word size of 5; and 3) the -postsw option. The BLAST sequence identity was calculated based on the alignment of the first BLAST HSP (High-scoring Segment Pairs) of the identified potential functional homolog sequence with a specific reference polypeptide. The number of identically matched residues in the BLAST HSP alignment was divided by the HSP length, and then multiplied by 100 to get the BLAST sequence identity. The HSP length typically included gaps in the alignment, but in some cases gaps were excluded.

[0261] The main Reciprocal BLAST process consists of two rounds of BLAST searches; forward search and reverse search. In the forward search step, a reference polypeptide sequence, “polypeptide A,” from source species SA was BLASTed against all protein sequences from a species of interest. Top hits were determined using an E-value cutoff of 10⁻⁵ and a sequence identity cutoff of 35%. Among the top hits, the sequence having the lowest E-value was designated as the best hit, and considered a potential functional homolog or ortholog. Any other top hit that had a sequence identity of 80% or greater to the best hit or to the original reference polypeptide was considered a potential functional homolog or ortholog as well. This process was repeated for all species of interest.

[0262] In the reverse search round, the top hits identified in the forward search from all species were BLASTed against all protein sequences from the source species SA. A top hit from the forward search that returned a polypeptide from the aforementioned cluster as its best hit was also considered as a potential functional homolog.

[0263] Functional homologs were identified by manual inspection of potential functional homolog sequences. Representative functional homologs for SEQ ID Nos. 79, 94, 102 and 107 are shown in FIGS. 3, 5 and 8 and the Sequence Listing.

### Example 19

### Determination of Functional Homologs by Hidden Markov Models

[0264] Hidden Markov Models (HMMs) were generated by the program HMMER 2.3.2. To generate each HMM, the default HMMER 2.3.2 program parameters, conFigured for glocal alignments, were used.

[0265] An HMM was generated using the sequences shown in FIG. 3 as input. These sequences were input into the model and the HMM bit score for each sequence is shown in the Sequence Listing. Additional sequences were input into the model, and the HMM bit scores for the additional sequences are shown in the Sequence Listing. The results indicate that these additional sequences are functional homologs of SEQ ID NO: 79.

[0266] HMMs were also generated using the sequences shown in FIGS. 5 and 8 as input. These sequences were input into the respective models and the corresponding HMM bit score for each sequence is shown in the Sequence Listing. Additional sequences were input into the models, and the HMM bit scores for the additional sequences are shown in the Sequence Listing. The results indicate that these additional sequences are functional homologs of the groups in FIGS. 5 and 8.

### REFERENCES

[0267] The following references are cited in the Specification. Each of the references from the patent and periodical literature cited herein is hereby expressly incorporated in its entirety by such citation.
[0268] Zhang et al. (2004) Plant Physiol. 135:615.
[0269] Salomon et al. (1984) EMBO J. 3:141.
[0270] Herrera-Estrella et al. (1983) EMBO J. 2:987.
[0271] Escudero et al. (1996) Plant J. 10:355.
[0272] Ishida et al. (1996) Nature Biotechnology 14:745.
[0273] May et al. (1995) Bio/Technology 13:486)
[0274] Armaleo et al. (1990) Current Genetics 17:97.
[0275] Smith. T. F. and Waterman, M. S. (1981) Adv. App. Math. 2:482.
[0276] Needleman and Wunsch (1970) J. Mol. Biol. 48:443.
[0277] Pearson and Lipman (1988) Proc. Natl. Acad. Sci. (USA) 85: 2444.
[0278] Yamauchi et al. (1996) Plant Mol. Biol. 30:321-9.
[0279] Xu et al. (1995) Plant Mol. Biol. 27:237.
[0280] Yamamoto et al. (1991) Plant Cell 3:371.
[0281] Tijessen, “Hybridization with Nucleic Acid Probes” In Laboratory Techniques in Biochemistry and Molecular Biology, P. C. vand der Vliet, ed., c. 1993 by Elsevier, Amsterdam.
[0282] Bonner et al., (1973) J. Mol. Biol. 81:123.
[0283] Sambrook et al., Molecular Cloning: A Laboratory Manual, Second Edition, Cold Spring Harbor Laboratory Press, 1989, New York.
[0284] Shizuya et al. (1992) Proc. Natl. Acad. Sci. USA, 89: 8794-8797.
[0285] Hamilton et al. (1996) Proc. Natl. Acad. Sci. USA, 93: 9975-9979.
[0286] Burke et al. (1987) Science, 236:806-812.
[0287] Sternberg N. et al. (1990) Proc Natl Acad Sci U S A., 87:103-7.
[0288] Bradshaw et al. (1995) Nucl Acids Res, 23: 4850-4856.
[0289] Frischauf et al. (1983) J. Mol. Biol, 170: 827-842.
[0290] Huynh et al., Glover N. Mex. (ed) DNA Cloning: A practical Approach, Vol. 1 Oxford: IRL Press (1985).
[0291] Walden et al. (1990) Mol Cell Biol 1: 175-194.
[0292] Vissenberg et al. (2005) Plant Cell Physiol 46:192.
[0293] Husebye et al. (2002) Plant Physiol 128:1180.
[0294] Plesch et al. (2001) Plant J 28:455.
[0295] Weising et al. (1988) Ann. Rev. Genet., 22:421.
[0296] Christou (1995)Euphytica, v. 85, n.1-3:13-27 .
[0297] Newell (2000)
[0298] Griesbach (1987) Plant Sci. 50:69-77.
[0299] Fromm et al. (1985) Proc. Natl. Acad. Sci. USA 82:5824.
[0300] Paszkowski et al. (1984) EMBO J. 3:2717.
[0301] Klein et al. (1987) Nature 327:773.
[0302] Willmitzer, L. (1993) Transgenic Plants. In: iotechnology, A Multi-Volume Comprehensive treatise (H. J. Rehm, G. Reed, A. Püller, P. Stadler, eds., Vol. 2, 627-659, VCH Weinheim-New York-Basel-Cambridge).
[0303] Crit. Rev. Plant. Sci. 4:1-46.
[0304] Fromm et al. (1990) Biotechnology 8:833-844.
[0305] Cho et al. (2000) Planta 210:195-204.
[0306] Brootghaerts et al. (2005) Nature 433:629-633.
[0307] Lincoln et al. (1998) Plant Mol. Biol. Rep. 16:1-4.
[0308] Lacomme et al. (2001), “Genetically Engineered Viruses” (C. J. A. Ring and E. D. Blair, Eds). Pp. 59-99, BIOS Scientific Publishers, Ltd. Oxford, UK.
[0309] Huh G H, Damsz B, Matsumoto T K, Reddy M P, Rus A M, Ibeas J I, Narasimhan M L, Bressan R A, Hasegawa P M, 2002, Salt causes ion disequilibrium-induced programmed cell death in yeast and plants. Plant J 29(5):649-59.
[0310] Kang D K, Li X M, Ochi K, Horinouchi S, 1999, Possible involvement of cAMP in aerial mycelium formation and secondary metabolism in Streptomyces griseus. Microbiology, 145 (Pt 5):1161-72.
[0311] Kerk D, Bulgrien J, Smith D W, Gribskov M, 2003, Arabidopsis proteins containing similarity to the universal stress protein domain of bacteria. Plant Physiol. 131(3):1209-19.
[0312] Zhu J K, 2001, Cell signaling under salt, water and cold stresses. Curr Opin Plant Biol. 4(5):401-6.
[0313] Susstrunk U, Pidoux J, Taubert S, Ullmann A, Thompson C J, 1998, Pleiotropic effects of cAMP on germination, antibiotic biosynthesis and morphological development in Streptomyces coelicolor. Mol Microbiol 30(1):33-46.
[0314] Davletova S, Schlauch K, Coutu J, Mittler R., 2005, The zinc-finger protein Zat12 plays a central role in reactive oxygen and abiotic stress signaling in Arabidopsis. Plant Physiol 139(2):847-56.
[0315] Fowler S G, Cook D, Thomashow M F., 2005, Low temperature induction of Arabidopsis CBF1, 2, and 3 is gated by the circadian clock. Plant Physiol 137(3):961-8.
[0316] Nachin L, Nannmark U, Nystom T (2005) Differential roles of the universal stress proteins of Escherichia coli in oxidative stress resistance, adhesion and motility J Bacteriol 187(18):6265-72.
[0317] Rizhsky L, Davletova S, Liang H, Mittler R, 2004, The zinc finger protein Zat12 is required for cytosolic ascorbate peroxidase 1 expression during oxidative stress in Arabidopsis. J Biol. Chem. 19; 279(12):11736-43.—
[0318] Vogel J T, Zarka D G, Van Buskirk H A, Fowler S G, Thomashow M F, 2005, Roles of the CBF2 and ZAT12 transcription factors in configuring the low temperature transcriptome of Arabidopsis. Plant J. 41(2):195-211.
[0319] Sanchez-Barrena M J, Martinez-Ripoll M, Zhu J K, Albert A., 2005, The structure of the Arabidopsis thaliana SOS3: molecular mechanism of sensing calcium for salt stress response J Mol. Biol. 345(5):1253-64.
[0320] Griffen, H. G, and Gasson, M. J. (1995) The Gene (aroK) Encoding Shikimate Kinase I from E. Coli. DNA Seq., 5(3):195-197.
[0321] Susstrunk et al. (1998) Mol Microbiol, 30(1):33-46
[0322] Kang et al. (1999) Microbiology, 145:1161-72.
[0323] Sauter M, Rzewuski G, Marwedel T, Lorbiecke R (2002) The novel ethylene-regulated gene OsUsp1 from rice encodes a member of a plant protein family related to prokaryotic universal stress proteins. J Exp Bot 53 (379):2325-31.
[0324] Kasuga et al. (1999) Nature Biotech 17: 287-291,
[0325] Rus et al. (2001) PNAS 98:14150-14155.
[0326] Shi et al. (2000) PNAS 97:6896-6901.
[0327] Apse et al. (1999) Science 285:1256-1258.
[0328] Zhang et al. (2001) PNAS 98:12832-12836.
[0329] Berthomieu et al. (2003) EMBO J. 22:2004-2014.
[0330] Ren et al. (2005) Nat. Genet. 37:1029-30
[0331] Davletova et al (2005) Plant Physiol. 139:847-56

The application's sequence listing, which the Patent Office published only in electronic form, follows.

SEQUENCE LISTING (357 sequences)

SEQ ID NO: 1 - DNA, 1823 bp, Arabidopsis thaliana
  misc_feature (1)..(1823): Ceres Promoter 21876
gtctcttaaaaaggatgaacaaacacgaaactggtggattatacaaatgtcgccttatacatatatcggttattggccaaaagagctattttaccttatggataatggtgctactatggttggagttggaggtgtagttcaggcttcaccttctggtttaagccctccaatgggtaatggtaaatttccggcaaaaggtcctttgagatcagccatgttttccaatgttgaggtcttatattccaagtatgagaaaggtaaaataaatgcgtttcctatagtggagttgctagatagtagtagatgttatgggctacgaattggtaagagagttcgattttggactagtccactcggatactttttcaattatggtggtcctggaggaatctcttgtggagtttgatatttgcgagtataatctttgaacttgtgtagattgtacccaaaaccgaaaacatatcctatataaatttcattatgagagtaaaattgtttgttttatgtatcatttctcaactgtgattgagttgactattgaaaacatatcttagataagtttcgttatgagagttaatgatgattgatgacatacacactcctttatgatggtgattcaacgttttggagaaaatttatttataatctctcataaattctccgttattagttgaataaaatcttaaatgtctcctttaaccatagcaaaccaacttaaaaatttagattttaaagttaagatggatattgtgattcaacgattaattatcgtaatgcatattgattatgtaaaataaaatctaactaccggaatttattcaataactccattgtgtgactgcatttaaatatatgttttatgtcccattaattaggctgtaatttcgatttatcaatttatatactagtattaatttaattccatagatttatcaaagccaactcatgacggctagggttttccgtcaccttttcgatcatcaagagagtttttttataaaaaaatttatacaattatacaatttcttaaccaaacaacacataattataagctatttaacatttcaaattgaaaaaaaaaatgtatgagaattttgtggatccatttttgtaattctttgttgggtaaattcacaaccaaaaaaatagaaaggcccaaaacgcgtaagggcaaattagtaaaagtagaaccacaaagagaaagcgaaaaccctagacacctcgtagctataagtaccctcgagtcgaccaggattagggtgcgctctcatatttctcacattttcgtagccgcaagactcctttcagattcttacttgcaggttagatattttctctctttagtgtctccgatcttcatcttcttatgattattgtagctgtttagggtttagattcttagttttagctctatattgactgtgattatcgcttattctttgctgttgttatactgcttttgattctctagctttagatccgtttactcgtcgatcaatattgttcctattgagtctgatgtataatcctctgattaattgatagcgtttagttttgatatcgtcttcgcatgttttttatcatgtcgatctgtatctgctctggttatagttgattctgatgtatttggttggtgatgttccttagatttgatatacctgttgtctcgtggtttgatatgatagctcaactggtgatatgtggttttgtttcagtggatctgtgtttgattatattgttgacgttttggttgttgtatggttgatggttgatgtatttttgttgattctgatgtttcgatttttgtttttgttttgacagct

SEQ ID NO: 2 - DNA, 1000 bp, Arabidopsis thaliana
  misc_feature (1)..(1000): Ceres Promoter PT0668
atagagttttactatgcttttggaatctttcttctaatgtgccaactacagagaaatacatgtattaccactaggaatcggaccatatcatagatatcaggattagataactagttctcgtcgctatcacttcgcattaagttctagtaattgttaaagattctaattttttactaaacaaaaactaaatcaacatcaaatatgcaaagtgtgtgttgtccacacaagtgactcaaagtatacgcaggtgggattggaccatattattgcaaatcgtttccgaaccactcatatttctttttttctctcctttttttatccggagaattatggaaccacttcatttcaacttcaaaactaattttttggttcagtgatcaaatacaaaaaaaaaaaaaaagttatagatattaaatagaaaactattccaatcttaaaaatacaaatgaaaccataattttaatttatacaaaactatttaattagctaagggttgtcttaacgtttagaaaataaaaaattatgattgtctgtttaaaattacaatgaatgaataaaaaaaatatgcaatgaatgaaagaataaattttgtacatccgatagaatgagaaaatgaattttgtacaaaccactcaagaattcaaaacaattgtcaaagttttcttctcagccgtgtgtcctcctctcctagccgccacatctcacacactaatgctaaccacgcgatgtaaccgtaagcgctgagtttttgcatttcagatttcacttccaccaaacaaaactcgccacgtcatcaatacgaatcattccgtataaacgtctagattctttacagcctacaatgttctcttctttggtcggccattatttaacgctttgaacctaaatctagcccagccaacgaagaagacgaagcaaatccaaaccaaagttctccattttcgtagcttctttaagctttttcagtatcatagagacacttttttttttttgattagaa

SEQ ID NO: 3 - DNA, 1000 bp, Arabidopsis thaliana
  misc_feature (1)..(1000): Ceres Promoter PT0535
ttagtgaaattatgacattaagtaaggttttcttagttagctaatgtatggctattcaattgttatgttaggctattttagttagtatatgaatttaggcagtctatgcaaatgatttcgttttcattttttcatatgtaaacatcaagatcaagtaacgccattcgagttgatattttttttttaaattagtgtgtgtaaattttggaccgcttatttgagtttgctaatgaagttgcatatatattacgttaaaccataggcaaactaatttgaaacatccgattcgatttcctgtaatttttcttggttaattgaccaaaatcaagatcttcagaaataaaataaaagacgaaagaaagctgtcgcaaagcagattgtgttaaaaaaaagtggattgggctcaaacgcaacttgtccagcccgtgacaattaccctatacgcaagtaagagtaacgtatcactggcaaaagttggtattagttacgatatctttgtcatgggggcatgcatgggcatggcttaagagttaagccttaagaagagtcccacactcgtgactctcatgatcacttgttgtttcttacgggcaaatacatttaactttattcttcatttattcacctatattcttttggataataacttttctctatataaaataacaaacatcgtacgtttcatttatttacaacaagcgatgagaattaaaaggagaccttaattgatgatactcttcttttctctcggttacaacgggattattacagataatgataatctatatggatgctgacgtggaaaaacaaaatttggtgaaacacgtcaattaagcacgacttttccatggctagtggctaagatcgtttcatcacatggctatatcatataatacttggatgaattcaaaataaacgactgagaaaatgtccacgtcacggcgcaccgctttggacttaagtctcctataataaatacaacaccaaacattgcattcca

SEQ ID NO: 4 - DNA, 999 bp, Arabidopsis thaliana
  misc_feature (1)..(999): Ceres Promoter PT0585
tgaagtcatttaatatgagtttgacattaggtaaacctaatctatgagattatagaatgtagcaaaactatcaatgtttcttttccaaaatattttgtggtttttctttttggttcattatgttttgttatttgtgaattattttaatatgaagtaattatattgattttatatgatatacatattattttgatataaaatttaacacttatccattaaaatagcatgggcataatcaaaatcgggactattacgatgaaaaagatagttaaattgtatgataaaataaaatgtgtaagattaaaattttgggttttagaaaattactaaacaaaatatagacaaagtatgttgactattatttaaaatttaaatatcatcaataagatatagttaaagtcattaagtgtatagcaaaatgaaaattctaagattaaaattcgattaaaattttttttactaaattaaatatttaaaaatagggattatcatttactatttacaattctaatatcatgggtaaaaattgataactttttttaaacccgcctatctaggtgggcctaacctagtttactaattactatatgattaacttattaccacttttacttcttcttttttggtcaaattactttattgttttttataaagtcaaattactctttgcattgtaaataatagtagtaactaaaatcttaaaacaaaatattcaacctttcccattattggaatggtaatgtcttcaacaccattgaccaacgttaaggaatgtcttttaatatttttggaacctaaatgctaatactgtataccacaatcacttatgagtattgaagttgagatagaggaggtacaaggagaccttatctgcagaagacaaaaagccatttttagcaaaactaaagaaagaaaaaagattgaaacacaaatatgcgccactcgtagtccacccctatctctttggcaaaagccacttcactctttttccctttttat

SEQ ID NO: 5 - DNA, 1000 bp, Arabidopsis thaliana
  misc_feature (1)..(1000): Ceres Promoter PT0613
ttaatactaacattgtagaaagccacaaaaaagaaattgaaatgtgagtagatgctgagtcagaggtttggtcaatacacaacagctaattgagataatattatacacgtcacgatgacttgttttttctcctcccaacttgttaatttctttattcttaaaattaaaccatcgcaaaaacagaagaacacagctgtttttctcgactcccaatttctattttgctgctaaggacatttcatttcattatttcccaattcaggactccttagattttcctaaatttgttttcctaacttgctctctctcattctaacattttctcatttttttagattatcttgtactttttagtagattattttatcaggttttacaaacatacattgacattctaaaaagggcttctaaaaattcagtgtggaatgctgatatactaaaaaaaggtcatgcaaaattatctacgatttatctaaaattagataatttgccatatataactattaactaataatcgatcctttgattttttgtttagataaaacgaaacagctatatcttttttttttgttatcggattttaatcgaataaaagctgaaaaataacagttatatcttcttcttttttaactaatgaaacagttatatcttaaacaaacaacagaaacagtaaaatattaatgcaaatccgcgtcaagagataaattttaacaaactaataacaattgagataagattagcgcaaaagaaactctaattttagagcgtgtaaacacaaacacgtcttgaaagtaaacgtgaattacacgcttctaaaacgagcgtgagttttggttataacgaagatacggtgaagtgtgacacctttctacgttaatttcagtttgaggacacaactcaagttatgtttgatatctaaggacttgcactgtctccaaatctgcaggaaggactttttgattggatcaatataaataccatctccattctcgtctccttc

SEQ ID NO: 6 - DNA, 351 bp, Arabidopsis thaliana
  misc_feature (1)..(351): Ceres Promoter PT0625
gatcatgatcagtttcaactcgctgtgcccacgtgtcgagagatcggcacgtgcctgagctctcagccgctcataaatacacttgtttagtagcaacagtatactatagtagtcctctcctgtttggcttttagcttgcatcgatggatggatggatggatcgcatgagagggcttcgcgaaggtacggaaccttacacaacgcgtgtcctttctacgtggccatcgtgtaggcgtctcgccatgctacgtgtcccggaggatgtctcgatgccaacccttataaatactgttccattccaatcccatcgccacagccagtgcaaatctgatcgatcaagataatcgagca

SEQ ID NO: 7 - DNA, 1022 bp, Arabidopsis thaliana
  misc_feature (1)..(1022): Ceres Promoter PT0633
cccgatcggccttaatctgagtcctaaaaactgttatacttaacagttaacgcatgatttgatggaggagccatagatgcaattcaatcaaactgaaatttctgcaagaatctcaaacacggagatctcaaagtttgaaagaaaatttatttcttcgactcaaaacaaacttacgaaatttaggtagaacttatatacattatattgtaattttttgtaacaaaatgtttttattattattatagaattttactggttaaattaaaaatgaatagaaaaggtgaattaagaggagagaggaggtaaacattttcttctattttttcatattttcaggataaattattgtaaaagtttacaagatttccatttgactagtgtaaatgaggaatattctctagtaagatcattatttcatctacttcttttatcttctaccagtagaggaataaacaatatttagctcctttgtaaatacaaattaattttcgttcttgacatcattcaattttaattttacgtataaaataaaagatcatacctattagaacgattaaggagaaatacaattcgaatgagaaggatgtgccgtttgttataataaacagccacacgacgtaaacgtaaaatgaccacatgatgggccaatagacatggaccgactactaataatagtaagttacattttaggatggaataaatatcataccgacatcagtttgaaagaaaagggaaaaaaagaaaaaataaataaaagatatactaccgacatgagttccaaaaagcaaaaaaaaagatcaagccgacacagacacgcgtagagagcaaaatgactttgacgtcacaccacgaaaacagacgcttcatacgtgtccctttatctctctcagtctctctataaacttagtgagaccctcctctgttttactcacaaatatgcaaactagaaaacaatcatcaggaataaagggtttgattacttctattggaaagaaaaaaatctttggaaaaggcctgcaggg

SEQ ID NO: 8 - DNA, 1000 bp, Arabidopsis thaliana
  misc_feature (1)..(1000): Ceres Promoter PT0650
catacttaattctaaaaaaacaacacttatagtttataagcagctcttatgataaaaatctttctgagttatagctctgttaaacttgtattcaccccaaaaacggatgtttcatttcttattttttacttggagtattttattgtaatttgtaaaaaaaaatgtaaagtgggggatatcatgaaaaacaacgtcactttgtttggtcacaatatacatttgataaaataatggtcgtcgcgtgatttagttgatttttgttttatcaaccacgtgtttcacttgatgagtagtttatatagttaacatgattcggccacttcagatttgggtttgcccacatatgacataccgacatagaaggttaaatccacgtgggaaatgccaatattcaatgtttggttttcaaaagagaatcatttctttatatgatctcaaaagtatggaattgaaatgactaatgagcacatgcaattggtgctatcttaaaaaccgaacgtctttgaatttaatttgtttttcaccaaaggtacctaatgaaaccctttcattaaaaaataaaggtaacaaacaaaattttgtattggaaaaaacattttttggaatatataatttggtaatagaattatgagcaaaaaagaaaaagaaaagaaagaataatgagcataataaagcctttacagtattactaattgggccgagcagttttgggctcttgatcatgtctagtaatcttaaacagacgataaagttaactgcaatttagttggttcaggtgagctaccaaatccaaaaatacgcagattaggttcaccgtaccggaacaaaccggatttatcaaaatccttaagttatacgaaatcacgcttttccttcgatttctccgctcttctccactcttcttctctgttctatcgcagacatttttgtttatatgcatacataataataatacactcttgtcaggatttttgattctctctttggttttctcggaaaa

SEQ ID NO: 9 - DNA, 998 bp, Arabidopsis thaliana
  misc_feature (1)..(998): Ceres Promoter PT0660
caagtcaagttccaatattctaaggagaaataatagtatactaaacatacattagagaggttaaacttctttttggatttaagtgtgtatgcataggctatttattcttaagtataactattaactgtagctagatttatacaagaaatacataaaactttatgcatgtgaggtagccatgaatatacgtacatgttgcaatcgattatacatgttgtatttggatttctctatacatgttttaacttgtcattctctaagtatatacataccattaatactgtgggcatgagtttatgataagacttttcttttggagaccagttttgttttcctttccacctatatttgtctataggcttcacggtacactagtttacaagtgtttttatatgttctaaataaaattgagattttccggaacggtatgatctgtttgcaaataaggacgtatatataacagtatcaaatatatttgttgttataaggcaataatatattttctgagatattgcgtgttacaaaaaagaaatatttgttaagaaaaaaaaagatggtcgaaaaaggggagtaggtgggggcggtcggcttttgattagtaataaaagaaaccacacgagtgacctaccgattcgactcaacgagtctaccgagctaacacagattcaactcgctcgagcttcgttttatgacaagttggtttttttttttttttttaattttttcatcttcttgggtttggttgggtcactcttcaggtcaggtgtgtaaaaaagaaagaaagaaaagagagattgttgtgttgtaacccctttgactaaaatctaatgaacttttttaacacaacaaaactccttcagatctgaaagggttcttcttctctcttagtctcttcgtccttttattctccgtcgtcgtttcatgatctgactctctggtcttctcttcttcttcttcttcttctattttttcttacttcgtcactgttgtgtctgaac

SEQ ID NO: 10 - DNA, 1000 bp, Arabidopsis thaliana
  misc_feature (1)..(1000): Ceres Promoter PT0665
aaaaaggatgggtaatgggacctattttccccaacatcccacatgcacacttccctctccattctctcacatttatttctttcattctaatttatccattccgtgtgtaacatattcactaataatctcatctcactaactcattcattgattgtgatatgtttatctagaattagtgttttaacactgtgtctacatatgatttccttttcattgtatgtgaacatgttaactcactaatcattttgtattttcgagttaacatgagtctccacttcggtagactaaagtaaagataggtttgagtataataaagtttaaaatttgctttaaaatcaatatttataaataagtttttatcataagtgatttttgtatgttatattggaccttgtataaacagactacagaagaaaattatttatgagaacttgtaatgttagagtggacctcgtataaactaattatgtgggcttttaccataaactatttatgaaaattattatggcccacaccactataactaaagcccacatatttagcagcccagtttcattgtaagagacatgttcgctctggaactagaattttctggtttttgggtatttgttttcttatgtgtagagaaatgatggtaacgattaaatgttgtgtattacaatttacaatggtaagacgattaatatatttacacacaattttgttgttgctgtaacacgttagtgtgtgtgatgatagaatttcataaagctttaactacgaggggcaaaatgttaattctaaatagttgacagcagaaaaagatatgtatacataatataaggattaaaacgtaaataataataaataaggcgagttaaattaaaaccctgttaaaaccctagcttgaaacacatgtataaaaacacttgcgagcgcagcttcatcgccatcgccattctctctctcatcaaaagcttttctccttgattttcgcattctttagagtcttaacgcaaag

SEQ ID NO: 11 - DNA, 999 bp, Arabidopsis thaliana
  misc_feature (1)..(999): Ceres Promoter PT0672
cagccgtaaatcctccataaatttattttgcaagttttgctcattatataatgagcggaatttatgatataatcgtttgtaataatgttatgttttgatcaaaatttgaaattaaaagtaggtgagaacttgttatacagtgtagataaggtggatcttgaatataaaaataaaatttataagatgtatttaaagcagaaaagcataaaactttagataaaataatgtaaaaatgtgttagcatcaatgttgggatattggccgacccgaacttaatcaatgtcggaagccattacttctctcccaaaagacctttttccttcggagaactaggaacttcctcactacctttcgcttaacgtgaaagccataaatttcatatattcataaaaatcagaaaatctaaaactgtttagtatcacctgtttttggtatagactattggttttgtgttacttcctaaactatatgatttcgtacttcattggatcttatagagatgaatattcgtaaaaagataagttatctggtgaaacgttacttcagtcatgttgggtctagatttacatactactatgaaacattttaagataataattatcctagccaactatatgttctatattatgggccaagaagatatagaactaaaagttcagaatttaacgatataaattactagtatattctaatacttgaatgattactgttttagttgtttagaataaatagtagcgtgttggttaagataccatctatccacatctatatttgtgtgggttacataaaatgtacataatattatatacatatatatgtatatttttgataaagccatatattactccttgacctctgcccccatttccttttactataaataggaatactcatgatcctctaattcagcaatcaacaccaacgaacacaaccttttccaaagccaataataaaagaacaaaagcttttagtttcatcaaagacgaagctgccttagaa

SEQ ID NO: 12 - DNA, 1000 bp, Arabidopsis thaliana
  misc_feature (1)..(1000): Ceres Promoter PT0676
aagatagtacagtttcagtgttttgagaaaaaaagctgaactaaaactaaaatgtttaaggacacaatatttagtttcaattagataattcaacagtttgaacaattttttttttttttttttgaagtcatttatttatacaatgttttaaaacgcattaagcatttaggcagccgacaaacgcctattgtctaactgtaaataggcgcttccacttaggttcatattgcatatttactatatgtgtatagtgacaaaaaccaatatttctcttattttggatgaaggtatagtagttgttaaatgttcaatataattaagcattaatgacaaataaaataaaattaatttagttgataaaaagataatcttataaaaagatcgatgaatagatataatggtttactgaattctatagctcttaccttgcacgactatgtcccaaggagaggaagtaccttaactataattctgaacataattttgtctatcttggtgagtattatatgacctaaaccctttaataagaaaaagtataatactggcgtaacgtaataaattaacacaatcataagttgttgacaagcaaaaaaacatacataatttgtttaatgagatatattagttatagttcttatgtcaaagtacaattatgcctaccaaaattaattaatgatttcaacaggaagtctgagatgatgggccgacgtgtagttacgtttcttgaattgtgagagatggtatttattatactgaagaaaacattatttactaaataaattttcatttcacatcttctgtaatcaatgcgggtagatgaagaagttgttaatacgatggccaaccatatggatctcttttttggcgtttctatatatagtaacctcgactccaaaggcattacgtgactcaataaaatcaagtcttttgtttccttttatccaaaaaaaaaaaaaagtcttgtgtttctcttaggttggttgagaatcatttcatttca

SEQ ID NO: 13 - DNA, 998 bp, Arabidopsis thaliana
  misc_feature (1)..(998): Ceres Promoter PT0678
aattaaatgaaaccgcccctaaattaggagggatttgggtaagtggtaacacattcactggaaacatgtgaagaaaggaggatgtcaagtagctgaaaactcagtatagtaaccaacggcttctcaccaacctttcattaataatttggtcatccctatatttttattcaacattttgtttttcaatagcttagagcaccttaatacctttcagtgtttttttataaaaaaaacaaaaattgggattaatcatcaatccccaaatgtaacgtttacttagattatgttcatttttctatacacacaaatcatattcttttgttttaatcttcgaaaaacgagaggacattaaatacccctaaaaaaggaggggacattactaccaacgtacattaacatgtttgatagcaaacgatttattttgttcgttttgaaaaggggaaagtaatgtgtaaattatgtaaagattaataaacttttatggtatagtaacattttcgaataataagagagggaaaacactcgccattgtcggcaatttagaaccaatattagaagggtttttttagagaaaaaggacttaaaagtttagagaccttaacaacaacttatttagaaatagacatgcttaagttgacaacagcgagtttattttctatatcgaagaaaaatacgaactttttcttaattagatttcgaatgcatgcactatcgagaatcgaccgtcacaagaaaaaactaatatacatactgtacatatctatattcaatattggtggggatgggtttaatgtgtatttataattcatggataaattcacacaataaggtccatgaaactagaaggtaccaaaaataagcattaatgactctttgccacttatatatatgattctctcatagtaccattttattctcccaaacctatcttcttcttcctctcttgtctctctcgctctctctcttctacattgtttcttgaggtcaatctattaaaa

SEQ ID NO: 14 - DNA, 1000 bp, Arabidopsis thaliana
  misc_feature (1)..(1000): Ceres Promoter PT0683
gattgaatgatgagtgtgcacccttgtattactaataaaaaatttagcaacagttataagctaacgtcatccatgagtcattcattagattcactatttgcgttctcaaaaatcgaattgttaaaatttgagaagctctaatatacgagtcaatgagatgtggcaaaagcatgtccttgaccataaaatttcgaggggtcaactcattagataaggacaagaatcaaccaattgaaggcgtcttctataacaagtttctttattactaatattaaagtccaatggggtgagggggagaagaacttaaataaaaggaaataattggtaagtgaataaaatctaaatacgatactagatgattgatttgtgctagtgcatggtattagatcagatatgtgttactattcgaattcaaattggcatattccatgttgttgataagaaaattgtagaagtgtaaaagctgagttactatattcaaactagtggtttacataaagtgagacaacaactgtttcacaaaaatgactataaaatagtaagtagtattaggtcaattgattttaaaattttaatcaaattcaaatttgtgatataatcaaatttgtttatagaaaatgttaagaaatcaattttggcagaactaattcagtgagaaacaatcatttacaaaaacaattttaacattatttaacagtaagatttgacatttaacccgttcgtgtgaacccatcatatctaacatggctctacccatgacgcctccatgccatggacaattttgacagatcagaagttctgaacgtggacgaggtaagaacaccatgatgatacgattggagttagttatgtcgccaccgacatcactgccaatctcattaataaaagtggtactaaatctctaatctctattaactataaatataacaaagaaccaaaagaaagtttcttatctctcttatctttcataatttccaagaaacacaaaccttttctacta

SEQ ID NO: 15 - DNA, 1000 bp, Arabidopsis thaliana
  misc_feature (1)..(1000): Ceres Promoter PT0688
acgttcagaggcatcgcttttgtacaaattgaagcgggtttgttcaatatttaaaataacacaggaaacattcaaatgtattattgatgttgcttaggtttgtgaaatgatatgaaccatatcgtatatattactagatttttcttatatgttttaagggtagtggggctgacctatcattctgtttggcattaccaatcagactatcagagtattcaccattcaggattccataactagaaaaagaaggggtttacattttctcatactgtataattttctactatcagagattttatcgattacattaatctcatagtgattattctgatttataaaaaagttgacaaaataattaaaaccagtattttataacaagattgtctctctcccatggccattattttgacctctgacttatttaaatcttaattaacagcataatactgtattaagcgtatttaaatgaaacaaaataaaagaaaaaaagaacaaaacgaaagagtggaccacatgcgtgtcaagaaaggccggtcgttaccgttaaggtgtgtcgaactgtgattgggccacgttaacggcgtatccaaaagaaagaaagggcacgtgtatagatctaggaaaaaagaaagaatggacggtttagattgtatctaggtaccaggaaatggaacgtcacaccaaacggtacgtgtcggatcctgcccgttgatgctgacggtcagcaacttccccttattcatgcccccctgcccgttaattacgtgtaacccttccatgcgaaaatcaaacccttttttttttttgcgttcttcttcaacttttctttttaaatcaaaccttttctttttaaaatcacattgcatttcctaacgctcaacaaaatctctctctactaatatctctctctctctctctctattgttgaagaagactcataatcggagattgtttgtttttggtttgctctgtaaattggagaagttttgttagagatcaa

SEQ ID NO: 16 - DNA, 1000 bp, Arabidopsis thaliana
  misc_feature (1)..(1000): Ceres Promoter PT0695
aacattttctttaacttactcttaaattttaatagtaagttgatgcatgttatgttgatccgtcttgatcacaaatattgttttatggacgaattctttgacagtaaatggctatagtgactcagcttggagcatcccgatatgaaaacaaagtgcagtattgtgtcgtggtcatcactaacgcactttcctagaactatcgcgcgtgtttgacctatgcaacacaccagatgtcatgaacgtatacttaaatagaaacaatgatatagacaattggctatattctgtcatggaacgcaaaccggataacatgtctattagattcatcggacttgatcatggttatgtcttaatagacgaattctttgttaacgattggttaaaacggctcacgttagagcatcctactatgacttcaaaattgataaatattacatggaaatcactttaattttagttagaaggtagttaatttagatattcttatttaataaattaaaaaatagaagaaaaaaagatgagaagagtttttgtttataaaataagaaatatcttttattgtaattttaaaattaaacaaatttaatttatattaaaattatctttgttttattgttaaggcaataattatttttttggtgggaattgttaaaacaataattagtatactgttaagtggtcctttaataataagataacgtgatttaaaaaagaacgagacaggctaatatagtagagaggaaaaaatacaatttaggcccaataaagcccaatatagagttgtgctcaaacacaggtcttcgccagatttcctatgacgccgtgtgtcaatcatgacgccaagtgtcattcaagaccgtcacgtggcgttgtttctacacataggcgatccatacaaatcagtaacaaacacgaaaagagcattcatatgtacgaaagtagaaaagaagagactctttgtgataaaactaagtaagaaatagcataaaagtaaaaggga

SEQ ID NO: 17 - DNA, 1000 bp, Arabidopsis thaliana
  misc_feature (1)..(1000): Ceres Promoter PT0708
gtttccaaaactagtattctttatttgctctattcattatatttttatatttgtaacgtcccgaccgtctttattaggtttcgacaatcacttctcggaaggtcgtccatcctgaaattactctatcctaaacatgtttaactataaaattctctcgaaacttttgtaacgtatataaccacataaattctcttaaacttatttgcatacaccattatatttctgaaatcgatatgttacaatattatttaatatttagattacttttactgaatcgaattaaatatcaaatcgaaacaaatctaatctaccaaaaataattttgttataaacatttcttgcctagttctacctcatatacattttagttaaagaaagaaatcacaacaattcccataattcaataattaaatccacaaaatcttggagtaagtaagagaaataaaaagatagtatcttaacataaacaattcaaagatgctctctcacacaattcacacacacttacaaaacaaaagacagaaacaatgttttcattcaaatcaaaagaagttataacactagtacaaaaaaagctcaaattctaatagtaactctttttatttcccaattacccaaagattctctctcacttcacaaaactagctttgagagtcgtgttccacaaaatccattaaagctgaaacggttttgctcaccattcaaacaaatacaaaattgcaaaaccccaaattataacaaaataatataaaaattaaaccgctaaaaagagtgaaccaacaaaaatcgccgaatgtgtgtgtaatgagaaaaccgacccatcatcccaatcatctcttcccgtgtcactctcttcctctcccacgtttcttctctcttccctttatgggttttaacttctccttcttcttcttcttcaatcttcagttttcaaattcaacaacaattcacattttgatttcttcatcatctctctctctctcgcttctctctcaaatcg

SEQ ID NO: 18 - DNA, 1000 bp, Arabidopsis thaliana
  misc_feature (1)..(1000): Ceres Promoter PT0710
tagtgcgcgtggggagagggaatggtgaaaccttagtggttaagttatgaggaaaatgataaaaggataaaacaatcaaatgcagcttgaaacggccataacataaagtaccttatggtggtgcgaatatttttgtgtttctttcactcttttattgctgaaagctacgacacttgtcttaatatattgtttccgcaagtcacatgatctactttttatttaacgtctagaaacgccgagatatatgatgattagtatatcacgtctatgcaaattgttagttcgtgtttggccaaaagatatcgagacatgtctgaagaaccgagtctggttttgagatatttcttcaagcattactatacaatagaaaaaggagacacgcgaatatgataatagcaaaaggcataaaaaggcgaaaattaaagaaaaacgtaaagtgatttggcctcaatcaacgggaacgtatcttaattttagaggttcttcttttacttttgagacgagagagtttgcgtctttgcgagctgctttggttgactaaacattatcatattgaaaaccaaaatacaacggaggaatatttgtcacagtttcactttcacattgtttccttaacgtttaatcaaccttgttcaaaatttctatagttgtaatcatcattgtttacaaaattttcgttcaaagatgattttaaataaaattgtgaaagaaaaccttttctgaaataaggattggatgatagtgttaaaagaaaaatatgaactgaggcaaaaagaggagtggtccccggaagattgtgaaatgtgtcatctaaaccagccagacgtagtcacgtgttctctctagctttatgaacttccttagccagcaccatcattgtgattgtagtatatatgtaaccctaccttcatctctcccattttccattctccatatagactcctttacaatatacaaaacctatccaaaagcgaagaagccaagcaaacatattataaaa

SEQ ID NO: 19 - DNA, 1002 bp, Arabidopsis thaliana
  misc_feature (1)..(1002): Ceres Promoter PT0723
gtcatatcttatcaacacgtcaacgatcaaaacctttagcctattaaattcaacggcttagatcaaaacgaaactaggtgggtcccacttttaatatcgtggctgcataacatttcctcgataactgaagccgttgtggtctttctcagaatctggtgcttaaacactctggtgagttctagtacttctgctatgatcgatctcattaccatttcttaaatttctctccctaaatattccgagttcttgatttttgataacttcaggttttctctttttgataaatctggtctttccatttttttttttttgtggttaatttagtttcctatgttcttcgattgtattatgcatgatctgtgtttggattctgttagattatgttattggtgaatatgtatgtgtttttgcatgtctggttttggtcttaaaaatgttcaaatctgatgatttgattgaagcttttttagtgttggtttgattcttctcaaaactactgttaatttactatcatgttttccaactttgattcatgatgacacttttgttctgctttgttataaaattttggttggtttgattttgtaattatagtgtaattttgttaggaatgaacatgttttaatactctgttttrcgatttgtcacacattcgaattattaatcgataatttaactgaaaattcatggttctagatcttgttgtcatcagattatttgtttcgataattcatcaaatatgtagtccttttgctgatttgcgactgtttcattttttctcaaaattgttttttgttaagtttatctaacagttatcgttgtcaaaagtctctttcattttgcaaaatcttctttttttttttgtttgtaactttgttttttaagctacacatttagtctgtaaaatagcatcgaggaacagttgtcttagtagacttgcatgttcttgtaacttctatttgtttcagtttgttgatgactgctttgattttgtaggtcaaa

SEQ ID NO: 20 - DNA, 1001 bp, Arabidopsis thaliana
  misc_feature (1)..(1001): Ceres Promoter PT0740
tgtggccactaaagatttacccttaaccgggcccatataagcccacgtcaagtggcgcttatacgctctccgtaagagagccaacatttggtatgtaatgttgcaaattattcttcaagacaataaattcaaatataattcaatattgtccaaatatagtgatgtacttcagttgtgcacatagaaactccactaaaccaacttttagatagatgcattcacaaattttcaacaatgtcgcgaaagtctaatccatcaccagattctaacattttaattattatatttaactatacatactctaatcagcatgagtcaaacgtgtacaatagcccaagcatataataagaccaaagtcaaactcaaataaatgtctccaaactcaaaacttgaaaaagacctaattattacatggtagatatgactttgtcgacaagtaaaccaactaatcctcgaagctaccttctcttcccagttattatgtgtgatcgatttataaatctcttcttctaataacacctatatttttcttatgatgtgaataaatataaaacttttaactttaaaacatatttatccgaaatattgcacttagatttcaaatagataaataatagtactatctaactgatattgaaaagacctaacacggaaaacagttttataaaaaatcccaaatgtgggtaattatcttgatttcttgggggaaacagaaaatggattaagattaatcggagtcgtgtcaagcagctcgttaataactgtagcaagttgactgagtaagcatcaacgtgtcatctccgtaaagcccattatttctagtctcgccgcgtcttctcttccacgtagcacttcactttttctctccttttgtttcctttggaacacaaacgtttctatttataggaataattacgtcgtccgtatctgtgtcggaacatagatccaaattaaaagcgacttacttaattacatatcgttcgtgtttttttcttcaaaaa

SEQ ID NO: 21 - DNA, 1024 bp, Arabidopsis thaliana
  misc_feature (1)..(1024): Ceres Promoter PT0743
tcgattggcccgatcggccccaaaatcaagctgagccgcttcaaacttcagcttttgaaatcacccccaaactcatgtcctcttatcattataactaaaggatctttcattttatttaactcatcgtcttgcactacccaacccaaaggttccaactatacccgaagctttctaaaggtccaaagactttttttttcgagccagactattcaagccaagaaaagccaaaccccacaagccagtacttttcaattccatattataaacttatctgtcttgttttagtcccactaaaaacaacagaatttaatttaggttgagctaaaacccttgacaaaagtgtatagtcgtcgattcagtagcacactcatcactcatcagatttgatagttgacctaaagtatgactactccatttcaactaacaaatgaaaataaaagagacctaagggttagaggattgaaactatactctcaagtcttttatcactaggctactaccagctagttaacttgatggatttaagcaagaaaacgtagaatttatattcgagcagattgtttagctaaaaaagcttgggtttgaaattgccttttctcccatataagcacgtcggttcctaaataactctttctagcggagagtgtctttccaataatttaataaaaatggtgtttgtatatcaaaaaaaaaagaaaaaagaaactgatcgagatagaacgtttgcagttttataaacaatttaaaaaacaaaaaaaattaaactcaatgtattttttattaattcacaaacaataataaatcataggatcgaatatttacacggtatcaaaacctactcgccgctactatataaaaattgaagtcaaatatcaaccgcaattattaaaccagcaagacaataattcataaacttaatataaacataaataaattaatgttacacaacgatatatggtgagggttattactatcttcttcctctcaaaacacatctcctaaccttaagctttagacggcctgc

SEQ ID NO: 22 - DNA, 1000 bp, Arabidopsis thaliana
  misc_feature (1)..(1000): Ceres Promoter PT0758
agctagccacatcagtgaccaaaaaagataattaacaaaccaaataaaataacaaattttgatcatttggaataaaatttataaaaggaacgaaagcgccttctcacgggtcccatccattgaaatatattctctctttttgctctatataataataacgcgtactaatttgtagtatatattattacaaagtcgatatttgattgttttgtgaacgttgatatattaattttcttggatgatgacaaaaaaagtcatagaaagtaacgtgtgaacatagcattaacaaaatacaaacataatatataaccaaatatatgaaaataggataaaatctcattgaatagatcttcttctattcaaatatataaatatttgtttgtctataaaattaacagagcattcacattatctaaaataatagtaaaatcaaaataaaactaaataaaaataactctggttttataacgattgattttaaatattagtttttgttgtaaagagatcattatatatgtctgtaatatttttatactgagttacatgatatttagttattatagcgtaattaactaagataagaaattaactaaagtgatattctgattattattatttttgttaggacacgtacgtggaaaaactaaacactataggttacaaaacggtataataaactcaccattactggaaaatgtttgcatttgactcaataagtaacttattataagttactgatataatgcatagttttgaaattcttaaataaattattttggtttcgcatgaaaatatgaaaggagagaaatttattattgtcacttatatatatatacatcgtaatcattttttcgtgaataattctctctcccattccattatttctcagtatctctctttctttcccttactttattgttgcttttaaaccttcaatttgctcataaaccaaatatataatatcaaaacaaacaaacaaaaaatcagaattcccctaata

SEQ ID NO: 23 - DNA, 921 bp, Arabidopsis thaliana
  misc_feature (1)..(921): Ceres Promoter PT0829
aaagttttgaattattgggaatcaatttcgaagttttgtaattctttgggggctaataggatattttattttcttggtttcgtctattgttgtttttctatttatggttgggcttttagaactctggacaggcccatgtcatatgttttcccttctccttatatttttcatttttcattttgttaaattaatgcataatatccaaaaacaatttaaatttttgaaggaaccctttagttacggctccgaagctttcacaagtgagaatgtgagatcaaagaaggcaaatggaggattttaaaagttaaaatcatcttttatctgcaaaagttgacaatttttttgtatcaaatctaaatcatcaaactctcttaaactacaagagcataacaacctctatgtaatccatgaaataatctgcttgaaggacataacataaatcattatggctagagtgactaacttcaatcaaatcctcttaactctagctcccttacaatggtatcgtaaaacattatgcattagggattgttgtcctaggaaaataaaataaaaatccccacagaccaactaccattttaacttaaaaataagcttcgtccgcgacgaattgttttccatcctaaaaatagaatggtgtaatctgctaatggtttagttccattaacttgcaagttctattgaaagcctaaatgtcaataaagatattaaaattcggagtcaaaagacaaatgaatcaaaagcaacaagacaagtcagctccattcttcactacccatcttttacaataaatcatctctcttttcacaaatttcaaactactctcattgccctttagctttgttatagagccaacactacagagagactcacacacttgtttcaataattaaatctgaatttggctcttcttataaacta

SEQ ID NO: 24 - DNA, 763 bp, Arabidopsis thaliana
  misc_feature (1)..(763): Ceres Promoter PT0837
aactacaagggagacataatatcaccatctggttcctgttatcatctgaagatttcttgttttaccttccagtgataaaatgatccttataatacatatagatatattaaattgctgtattttaagattatagatatataaggtacatgagagtgtttatttaaaaaaattcacttggaattcatgttttgtgatacgttagattggaatccatttgggaaaagaagaatcatctgttcttatgtctcaaattttgacttcattcacttttcttcttgtcttttaagaaagcttccacaatctaactgttcgatgtgaaaactgagattcgagtaagaaaatgtgaactgtgttatactgttttttaattagataatttagattgcactcagataaattaataacattcctcgaatacttttatgtgattggatatattaggtatatctgccaaccaaccaataaactgctatgtttaaacaaattaaataaattagtatatgtttactcaagaataaagaagatagaaaagaaaattctatatgagctaaatttgctggaggaggcatcggacgtgggtaccagacctttccaagcacacgagtagtgcttagccatgtcatgctaacatacaccatttggttcatacaaaatccaaatcaaaatctatttttaaaatcttttgcacacgtctttgaaaaacacctctcatactatagctacggaagcttcaatttcaaggtttgtctaaaagctaacgatt

SEQ ID NO: 25 - DNA, 751 bp, Arabidopsis thaliana
  misc_feature (1)..(751): Ceres Promoter PT0838
atactggtatgcttaaggttgaagccaagatctctgtcttacccaagtaaccactttctattagaagggatcaacactaagaatatggagatttaagcctaagggctaaggcggttctcaacaatacatgatgtgaatacaatcacagacgatttactgaggtttgttgataagatcttgatcagtctctgcatcatctgttcaacaatctcaatctttgactgtttgctttcggagccataaacagaggaatcccttattccctgttataggagcaatacaccaagtattatttccatggctgaaattctcttatggaaacctaattgttccattgaagctgtaaaatcgaatctggtgaatattctcgagcaaagccgcatgctaattatgtcaattcagaagagtttgattaggagactcgaagcgagtttgatgatctttcttgatgttcaactccgattgtaagggtataattgacttttcatgtattacggctccaccacctgacactaaggcactctttgtccatctcgttggtatcatcggattcggatggtaaaaataaaaagagcagaggaaacttgttactcatgcaagcttctcaggtgccacgtcactccattacgtgtcatcttcacacaccatctcgctcaaaaccgatctcatttttcaaaccttaaaggcagaagcaactgattaagttaacactcttgagaagctctcgattaagcttgaacttggaggatca

SEQ ID NO: 26 - DNA, 669 bp, Arabidopsis thaliana
  misc_feature (1)..(669): Ceres Promoter PT0848
tctctttaaatcagttaactaaccgtttatatatttacgataaggtttgaagagattattgataaaataatacatttcataatcccgcgttcaaccgtttaaagtaacatttaagttgactatatctaattttttttccattaaatatggagctggtaaactttatcaacttctaaaaagtgtaacaacaaaaattaggtcaatcacaattctgttttttttattattttggattgacttccaattgcaaatagtcttagtgatcaccattatcatacatatatacatcaagtaggtttcatcatgatataccacaaagtatttgacaagccatatggttttggatcaaaaagtcggtccaaaattaatgttttatgtgcaagaaccgacccattgtacacacgtgttaacatcttcaagactttcatctctatttttcttttggtcattaagatacccattgatccgaatctgttacattcccacctacttttttaatttttactatccactccaaattaaacacaaccgatgattttaataattggaagcttttaaaaatatttcaaaacaagcctctttgtgtttgtctatatatatacacgtaataagaaggtgaatgaatctcacagcttacttgttctaaggcttccaataacgaaaacagta

SEQ ID NO: 27 - DNA, 702 bp, Arabidopsis thaliana
  misc_feature (1)..(702): Ceres Promoter PT0863
cgggaaacgacaatctgatctctagtccagtcgattggcccgatcggccgattataaacttacatgagacaagtataaataattattataaacttattaagtttaagatcaaggcttttgtgcaatgtatcaatgaatgttagatgtgatatgatgaaagcaatgttttaaacacatacatagtcattgatcggaatgtgtgttattagaaatgcatgcctaagccgatagggttatctatgtttggtcttggacattatagccaaatttcgaatctaattcttccaatatatatttttttttttttgcttagggccactactagtattgcttatcaattttaagagctcatgaaaatgcaacaatatagtagttgcaaatccttgtttcaagagaaatcaaagggccacttgtgaattgaataataataatatttgcaaataacctttcactaaaccataccaacaaaaccacacagatttggcaaagacataacctttgggagacgtgaaaaggctcaaaatttgacaattgtccttacaaattcgctcattagtgcaattgtgagatttgtttgcatccaaatccaattcataactcacactcgtctcaaattcgaaaaggcctgcagggccagtgcactgggatccaacaatgtcctccgactcgtccaagatcaagaggaagcggaaccgcaccgcg

SEQ ID NO: 28 - DNA, 435 bp, Arabidopsis thaliana
  misc_feature (1)..(435): Ceres Promoter PT0879
ttctaggaagactggtcaagctaagctgtttctgttttttgtttttgtactttactttttgtttgctagtgggaactgggtttattgggccttgaagttgataaaagatgaataaaagacatatcgcctaaagcccatatgagaagcagaagacaaaaacctccaactttgggcataaattttgattatagttaaaagtccagacccaatttggcacctggcttagttacgattctaaggcatgacacctgcctaatatgtttattacagaaaataaagagaatcagctaggtgtcccttattgaacacattaacaaactccaacgacactacgtgtcttcgtgactcttactatatccaaaaacctatagctaaagctgaattttccatgattagtatagtcccaaccaaaaaaatactgaagaaggcataagc

SEQ ID NO: 29 - DNA, 397 bp, Arabidopsis thaliana
  misc_feature (1)..(397): Ceres Promoter PT0886
agtgtatttgaaaacgacattgaagaattaatatatttttttttaattttagttttttatagtacaaatattaaaacaaacaatcctaccatatcataacatttgtaaataacattttaagttttgttttgagttttaattaattttctatgacaaaaaaatgaagtcaatagactaagtgaatcatatagtataaataaacacaatttaaatagtttcaaataaatttagaaagaataaaacaaatagaaatcagaaggtgtctgtttcctcctcgcaacatacgatcaaagagaaacaacttgaccctttacattgctcaagagctcatctcttccctctacaaaaatggccgcacgtctccaaccttctcccaactccttcttccgccatcatc

SEQ ID NO: 30 - DNA, 1024 bp, Arabidopsis thaliana
  misc_feature (1)..(1024): Ceres Promoter YP0007
agcagaacaactatatttattgtgtcacataaatctgagatcatttataaccaccaaagaacctatacacagtaaatgacaaatgtatctccctctatctctattgcccatatgtagatgctaaagtaagatttctcttttttttaatgtacttttttttgtataaagtatattccataagaaaaaggaaaagcttgtttatggatcaattgaccccaaaaaaagtttttagatcaaagcccaatataaaaaaaaaacacagtagtgacacaaaggaacttaaataaaccatgaattgatctataaacagtagagatcgataaggcgaacattttccatgtgaagtgtcttctttcatctataatatttttgacatccaataatttcctctataatatcattcacataattgatagaaacattatgttagaattgtccacatcatttgagctgtaatatattctgttttaacaaattatatggtagttgcttaatcttatgtccatcttcttctatgcatcgttttcgcgcctagttgtccagtccatttcaactacctacctctaattcttatcttaaaacaacattttttaatttaagtattatgctcaaagactaactagatagaaaaccgttattaaacattaaacgaattaaaagtcttacatggaaaatgtaggtttataaaccacgagttatgattgacaataaaaaaaatgcaaatcatcaatcaaaagagacttgagtgcgactctatatcaaccattgcaattaaaattatctatcacaaaaattttagacagattaagttaatttagtctaaattcactaatttattttctataattagtaattaactatatttatttatttacacattttctgataatttagaaatttgcatgaataacaaatataagattttggaaattagtagcaaatttaattaataattatttttgcctaaatgaaccaaactataaaacctccacatacaccagtcatcaaatttacagagacaaca

SEQ ID NO: 31 - DNA, 1000 bp, Arabidopsis thaliana
  misc_feature (1)..(1000): Ceres Promoter YP0008
ctcgagagatgaagtcttagtaatgtttgaacaaacaataatcacgttttccatcaaattcgagcatttaaagtttatattactacatgccccaagatgataccgtccatctcatccgaaaatatttctgaaattgcgctaagacaacaatgtttgctcaaattcgatcatttaaagtttacaaatctctcatcaatcttacaaacttctcacactaaacagaggtacatattttcttataaagacaaaaggttcgaacagctggcttctcaactcgagttgtttgtcagggcctctcttcactaactacaagttggtacttcaaatattggtggctagcttcacgtgatattgtctacaaattaaacccatgaaaaagctgcattaattgttccaagtgaaccctgaggagtgtcaatagtctttgctttagtgtgatcattaaaccaaatctctaaattcctaatttgtactaacatttggaacgtatttcctactcttctccctgctccaactcccaaaaataagattagttagatttctataactaatatacatgtatactcccaaaaacagtaaaaccatattaataaagctaattttgcatagatttatttcggtaaaccggcggttcaagttggggaaaaaaaagacaaacggtctaaagtcatccaaagacaaaaaaccaaagacaagttgagagagacgagaccaatcacaacattgcttcgtagattgcgtgacatcatccttgacggctactttcatttgtgtcttatttggataaaacgcacgtgtttaattcacgaaccttcatagcaataagaaatttccattactttcatattttcaactttttttattacccattacatgcttaaaatattaattcacaagtctttgtcaaaattcaatattttccaggttcatgaaccctttttatctcaatctactctataatatctccctataaattacaacaaaacctctttatttttca

SEQ ID NO: 32 - DNA, 999 bp, Arabidopsis thaliana
  misc_feature (1)..(999): Ceres Promoter YP0019
ttacgcggcgctacactcttatcaaagtttgaagatttttcaagagacacaacagattcaagattttctggtggctaaacttacaatgacagtacatggaggatctccgcgaatggayttctgcaatgtactagcgtagaacaaacactttttgttaaagtcatcaaccaacatagcatagagttgtttatctgaacagaacactgaaagtcttggttttgtttgtgttccagtaaactgtgtcaaaatgaaagaaaatacttattaacaagttcggcaaaaaaaattcaaacttttgtgcattattatatgaaagcacttctagaaagctaccttcttcctgctcctcctgttcctagttttcggactctccactcgagtgttccctctcgcttcaatcacaaacggctttactacagacatagctgataaaagggtcgaaaaatcatgaaccaagtaagcgaaacagaggataataaacatggaagaagaacagagtaagacgaattataccactcacttgttattcgaattggaaactggggataaggtttcaaacgagttccgagaatgtcagagactctaaactgaacagtagaaagagaagtcaaagcagccatgccaagtatcattcgtaaagcatcgaaagtcagaacattaccctcagcggaatttaatcaaacaccttctgtgcaggaataatctctgggggttttatcaacactcaaaaaaaactggaactttgtaaataaaattataaatgttcgtacctttatgcaaaatttctcacagcgtaattatctatttcctttttgtcctttatgaaagaggataaggtttttaaataataaatactaaattgtttttaaaagaaactaaaaataaatggaaagccttaagcgtcgtcaatggttctagagtcttctgcaactttcttttcatgaaactactgtaatcttctgctaacatatataatctcaaacactatcttctccaatt

SEQ ID NO: 33 - DNA, 1024 bp, Arabidopsis thaliana
  misc_feature (1)..(1024): Ceres Promoter YP0028
gtcagtgaagtcgattggtagtacttgaaacacttggttggtttcatgtatttggcctatatataaacaaacatcgtaattatatacggatttttttcggaattttacgccatatctgtaagtatatataacatgcatgtcgttttcaaattcatatgatgaacgatccacgtaagtgctactactcctacaatattgcatgagagagatatgtatttataaattttattttgaagaagaaataagagggaaggttacttgggtggatcgatgtgaaaacaaaagaagaaaaagcgaaacccactaagccattacatgatatcgaccttcttatctttttcctctttattttatttttctcatcttctttttgtcaggacttttttctacttaatgaaacctccaaactatctaactaatacactcccatgtagaataaagaaaattatataagatattgttgatattttgtaactagaaaatatatttgctctgtaatttttcgtaagttaaatcaacattttaaagtagaaacaaatattactgcaaaaagtaggatcattatttttgtccaaaatctcagttagctatagggttgtagtaaaaacaaaacacattcttgatttgccccaaaaaataaagagagagaagaatattgttcaaaagtggtctcttctctctctaattatgttttcactaaacccaattagattcaaacagtctacaaagtccaaaagataaacatgggacaacaattcgatgcaaaaaatcctcttttcatgctctttttttattctctagtcttttaaattactaataaaaactcacaaatccaccaaacccattctctacaactcaccttcatctagatttacccactcccaccgagaaacacaagaaaaaaaatatacatatataaatatacaagacaacacatgatgctgatgcaatatacacaacaaagtattaaatcttagatattgtgggtctccctttcttctattcattttcttattcattaaaa

SEQ ID NO: 34 - DNA, 1024 bp, Arabidopsis thaliana
  misc_feature (1)..(1024): Ceres Promoter YP0039
ccgttcgagtatttgaaaatttcgggtacacccgcctaaataggcggaccttatctagtatatatatacatttgaactatattgtttactttttagttgatttaggctatgtcatgacattgacataaatctacctgttatttatcacgtgtaattcgtgtaaagtgtaaactagaaagttcaaatacgtatttgtttttgttctgttatataggattgtcatagttgtaaatctacaatttattacaacatgaataagtacacaagcaatgtaattggatttaattgctaaactctttacatggtcaatctaaatttgataagaaatacgtcacatattactaagactgatagtttttttgttgtcaccaattatttttgttaaattgacgaaaacaattccaaaaactcaaatgtacaaaatcatacagtctcacaaacatctcatagagaaagatataaatctcccatatgggaacgataacacgaggtcgaaatactattcgtaaaactaaaacgccttagttataaatcgttagttgtaaccgcggtcgagaatacatacagatccacgaaactactactacacatgctgctgaattggaatttggaaaagaccatcttctttaggaagagctcacccaatgagtgacaaaggtgtcggtggcttgttttctacccatatgtatacatcaaatggtagtttcattaacgtttggttttgagaaaagtaagactttggctagtagctaggttcgtatataataaactcttttgagaaagttcatcactggtggaaaatgttaaaccggttttttctcattttttccgccatgttaaccaccggtttaaaaagaccgtaacacattgaaagattaataagggtatatttgtaattacggtttgctggcaatttttaattattattttaattagagaaaatagagaagccctatcaatgtacatggtatatatataaaaggcaaaaccctagaaaacgatactattcgactcagccgtcctt

SEQ ID NO: 35 - DNA, 1024 bp, Arabidopsis thaliana
  misc_feature (1)..(1024): Ceres Promoter YP0050
aatctgatctctagtccagtcgattggtacttgagggaaacatcatatttttaaaccttgtctcagtaagctaacacacaccccttgtgattacttatccatgtttatccacaagaatgcagttggattgagatattttcttctttgttgaaatcaggcctcaaggtgttcatgtggtctgcaaaaaaattcccaaaaataaagatagtgacatctgaaatcgataatggattagacgaagagtttcgtgttattccttggtatgggcgggtttggggacagatattttggcacagacgaggactaggccactgtggtcctgcagcattaggtgtcccttccatgtcctgcattacattttattgatggattcatcaccctatctactacaacggctacacaaactatgaagagttttgtttactaataaatgcccaagtgaggggtcgatcgaacccgggacacgtttttcagtttaccatatagaattatccttggaacccttgatactccatagaacatcaccacctctgttgtcatctcaggaatccaggttcaaacctagtctctctctccctagtgggaggtatatggccactgggccaatgatgacaaaatgcaaaaaaaataaaatacatttgggttcattatctaaaatatctcttgtgtttgtaagttttggttgcacactcgtgtggttgaagtgtgtgtgagaggtactatacaatacactctgcttttgttttgtacctatctctttctcttctccacatatccaagactttggggataaagctgagatcattggttgccatttggttgtgtagaagcaatcacccatttgctttatccgaggttgataaatttcctcgggttctccttctgacacgtatgacaaattctaatagtatattcctcgtagatattacctatatattctcaatagttgcaggtacttaaggctttgtcttggcatcctcgtcctcttcagcaaaactcgtctctcttgcactccaaaaagcaa

SEQ ID NO: 36 - DNA, 999 bp, Arabidopsis thaliana
  misc_feature (1)..(999): Ceres Promoter YP0086
cttatcctttaacaatgaacaggtttttagaggtagcttgatgattcctgcacatgtgatcttggcttcaggcttaattttccaggtaaagcattatgagatactcttatatctcttacatacttttgagataatgcacaagaacttcataactatatgctttagtttctgcatttgacactgccaaattcattaatctctaatatctttgttgttgatctttggtagacatgggtactagaaaaagcaaactacaccaaggtaaaatacttttgtacaaacataaactcgttatcacggaacatcaatggagtgtatatctaacggagtgtagaaacatttgattattgcaggaagctatctcaggatattatcggtttatatggaatctcttctacgcagagtatctgttattccccttcctctagctttcaatttcatggtgaggatatgcagttttctttgtatatcattcttcttcttctttgtagcttggagtcaaaatcggttccttcatgtacatacatcaaggatatgtccttctgaatttttatatcttgcaataaaaatgcttgtaccaattgaaacaccagctttttgagttctatgatcactgacttggttctaaccaaaaaaaaaaaaatgtttaatttacatatctaaaagtaggtttagggaaacctaaacagtaaaatatttgtatattattcgaatttcactcatcataaaaacttaaattgcaccataaaattttgttttactattaatgatgtaatttgtgtaacttaagataaaaataatattccgtaagttaaccggctaaaaccacgtataaaccagggaacctgttaaaccggttctttactggataaagaaatgaaagcccatgtagacagctccattagagcccaaaccctaaatttctcatctatataaaaggagtgacattagggtttttgttcgtcctcttaaagcttctcgttttctctgccgtctctc

SEQ ID NO: 37 - DNA, 1024 bp, Arabidopsis thaliana
  misc_feature (1)..(1024): Ceres Promoter YP0088
tcgattgggattactacttcatctagtaaggttctgaaaacgtttgttgttgataaggaagattcgtctcaggttattactgttgatcttcaaggtttgtgattgtgacgcttatacatgtgctgaaactgtggtgtttatttattgaaaacaaaaaaaaagtctctcttgtagtttcattgtactaaatagaaaacaagaaacgtttttttctttaatcttctacattgataatattggatcaaaggattgtttctgcaagacacaacacaaacatacttatactagtttacttctactaagtactaactacatacccatacacacacttgcacctagactttacttctagacatcattaccctaaggtagaaccaagcttacaagcaagttttaccgacaactcttacattacaactctagtctgtagtctttaacgtagacttactaactagtcattagtggtttaattttttaaattttcatccatatgtttttgttgtagatataaactaaagtcggtcacatttaataattgtcattatgtccgcgtaaaagtcaattcagctattggacatttatgaaatgtaagattttctctctcatttccccgtgcgtgaagacatgcattggtttttctgtaataatcaacaaatccaaaccccttttcgatctttatttggacattgttagagacaaaatttctctatagtctttttcctaatttgataccatgtttttgtttctgcacaaatttactcactggtttaactaactatccacttatttatgattttaccattaggcgtcagctagccctagtcaaatttgtaaacaagccaagctatctacataaatcgagatgtcattaacgttaatcgtcgttaattcgaatttgaaaacatagatagctttagcagtacaatgggcaatggtaagaagaatagcaaaaggcccaatatttggtttgcagaaattaaagccttaaaaaaaagcccacagatatttgtcaaagaaccctaat

SEQ ID NO: 38 - DNA, 1024 bp, Arabidopsis thaliana
  misc_feature (1)..(1024): Ceres Promoter YP0092
aaagattgagttgagagagatggtggagacgcagaacagacaaagggagtttaccatatagtgctctaaagggcaatgagattgcagtgatgtggctatccggggaatcatcgcaggttattccttcccatgagcaacaatcaatggatgggttccaattcagaggagaaacagaagaagaaacgtttccagagaaccacagtagggattctcgatcttgcgagttgcagagagcctctgaaactgcaatagaaaggacactgatgaaaagaacacactgaaggagtatgccaatcatgtgaaaactcagagcttgtattggtcttgtggttgatgaagttctcacaaaacctttggctttgaatctcccctcattagtcatggtgagaacaagaacaagacgagaaacagacaaagaagatgaaaaaacttgttggccagtgttgactaagggggaatagccccagacataacaaaattagacttgtcgtacatctttaatatttttttatctgtttctttgtcctgacgctttcattattcctgtgatcaattttctcataccattggtccatcgttaatcctttcttaatttcattttctacgtaacatgagaggagaccaagtcctatgagaacagttgacgtaacagtggttgttaagttaagttaaaaagaggaagctagtgagagtgaccgttaggtagagaagtgagatctttaaccactcttctttctctctctctctgcttttttcgtcgtctttcacatctactgttcgcaaactctcttatgcttccaataatggtgataccaattgagacttgcaggagaatctcctcttctccacactctatcaactggtcagccatggaatggtcgtttcagtttcaatattcctggattctttttaaggattcctgtttctcttctgttcctggtatattcttaacgacgaaattagtatcggatcctggtaatacattttgaagcttttaagtaccattgcactgggatccaacaat

SEQ ID NO: 39 - DNA, 1020 bp, Arabidopsis thaliana
  misc_feature (1)..(1020): Ceres Promoter YP0096
gaggtcagtgagtcgattggtgcaaaattgaaaaattgaagggtgaaacaaatttaaagataatatctattaaatcctctaattttaaaaatttagcaaaaattgtattttcttatggatctgttagttcacacgtatcttaattagtaccaaatcatatctaatgattagtgataaaactagttagatatctatatgtgtctttaccatttaacttgaatccttcttcttttttttacgtaaacaacttgaatccttcgttaatacataaatttaaagcattttttctttaattctattgatcggtatatatttactataagttttagctcatatgcaatttcaaatgatatgcttttaaattttgtctaggtgtgatagttgtatctttaacataaatcttatagcaaaattatacttgatattctaaatttatctatttgctcttgtgaacctcatattagtctagagaaactttgaaatcctttcaattagttgtatgtccaatacatttttactaacatttattagtctttttaattaagattattgttagaaaaaaaaagattttttaaaaataaataatatgttttagatacaatgtgagttaggcttcttatattttaaaaaataaatttatttcatacttaaaaatagtttggaatttcaatttatttggctgaataccataaaatatgtcaatttgaaccttatacccattgactatttggtgttagaaaccctttaacaaaaaaaaactatttggtgttagatatcaaaataaaaaaagtttaaccattggtttcttatattgaattggatattgttacatgtattaaagtttttttggtttaattttgaaacgttgatagaaactattaagtttaagtttggtagtatatttatttgtggaaaatttaattgccattaaatataacgtcaactttttttggttttttttgagaagttacgttgtgattttgatttcctatataaaagttagattacgtcattttttaa

SEQ ID NO: 40 - DNA, 1000 bp, Arabidopsis thaliana
  misc_feature (1)..(1000): Ceres Promoter YP0097
ttcatctttatatttaagagtttaaaaactgcaacttttgtttttctttcactaagtcttatggccacagttaattaaaagcagatgaaaggtggtccaatggaaaaggagaatgtgattgggctagttgggagagttctgatgtctagtgttgggtacacgtgtccgtcagttacacatagcattaaatcagacggcatgtcattattcaaatctagttcacatagtacgactaatagctgataaattaatgattatacagcatatgaattatgaattcaaaaaaaaaaaaaaattgaaaatgttaaggagatgctatattttacaaaattcatcgcaatgctttctactaatttgctaagtggtcttctccagttagtcttgtcgattccaagcgatattattaaatcttgaagcatcgctcaaagcattatagcttaagataaccaaattgttattaaaaacacctagtgaaatttttaaattaaaacaattttgatatctttgtaatatctaatactactctttctgtgtctaaaaggattaattttcaaaaatttcacacatattaaaaaaaaaaaaaaattactagctaaacaattttcaataatcataaaacaatagtaacttaataatttttttttattttcaaaatagtccttcaagtttacaattcattttagtattataatcaacaaaatttgtattaaaaagttggaaaattaatctttgtggaacaaaaaaatctagaaatcattttttagaattagagagaggtttgataaaaaaaaataaaaaaaaatagagagaggtagtacatactaaacgatgtgatactactattgacaaaatcttaattctcagtttagtagaataaactagaaggaatgaatgaagtaaatgcgaatccaactactaacaaaccctacttagtcatcatattttcccatatgaaatccctatataaacccatcatcatctcccacttttttcatatcca

SEQ ID NO: 41 - DNA, 1004 bp, Arabidopsis thaliana
  misc_feature (1)..(1004): Ceres Promoter YP0101
ttctcgttctctagaatattgctggaccggattaggtcaatattattgggccagattagatattgaattgtcgacgttgcttacgttacgttatatcttgtttaagaattaaacctatcgacttagtcttaattaagaaaacattgccttaaattctctggtctgcgaccgtttttttgaccgttaacccctaattaaagaaacaaaataattatagaaagagcactgaaatgtgattattttaacagtactcttatgagaaaattcgtactttttagttttttttttgtacaaatctctaagaaaaacactactactaattaagaaacgtttcaaacaattttattttcgttggctcataatctttctttctcggtccgggactaaccgttggcaaaaaaaaaaaaaaagttgacaataattattaaagcgtaaatcatacctctcaaataaaaacttgaatttggaaacaaagacaactaaaaaactcgaatttaagagaattcctaaaatcaagtgaagtatcatcacttggtaaaatttcataaccgttggcttctatttctatgtgtgccttggtttgcaggagataatatttcatttccaaccaatgatattcgtacacatagtcaaacaaatgtttgtctttgttattatattgagaaagaaacaagaaagagagagagagatagataagacgaaggaagtgaagcttccaagcgcccaccgttaaaaatctcgtgtgcaagtttcaaatacaagtggccggtggtctccataatttgatcgtcatccaattaaaaaggaagaaaaagcgtgttttatacaagaaaactcattaaaatagcaagtctagaaatatctcaacactaatctaccacgtctattacacacacacacacacacacttgatcttaatttattttcaagattcaagaaaatacccattccattaccacaacttgaccacacgcctatatataaaacataaaagccctttcccc

SEQ ID NO: 42 - DNA, 1000 bp, Arabidopsis thaliana
  misc_feature (1)..(1000): Ceres Promoter YP0102
atttggttgataacgttttcactcgactaattatatacttcagaaggatagtaatagaataccaaaataattaaatgattggttagtgccttagtggagactttttaaccgattctaatagactaatgatgtagctaagcatttatttgggatcatcactgtttgaaaacgtgaaatgtgataaaagttatgaaacgattaaaatataaaataaccgtacaaaacattatgtaccgtttttttctctgttcttttggcgatttggtttagttcgttacactctaaatgttattgcagatatatatataatgatgcatttgcatctgaggaacatataattccggttaacacttccaaatcttatatccgtctaggtagggattttataaatcatttgtgtcatcatgcgttatgcttgtcggctttgaccataacgcagagatatagaactagcttttacttaacttttagatttattatttgatctagagttaagtggagatatatagtgtttttgttagattattggtggatgtgagagtttgtctttagtttcaagttgagaatataaggcaagaggagactctgaggcaatcagaggttttgattggcaaaatatccaaaaggcccaaaccaagtcgaagcccatctcgtacaaaaaaagaaagagatctgtaagaaaaaatattctttgatattcttacaaaaataagtgtaaaacttttattagtcaaaatcttcaatctttaaaaactctcatcactcctacgaaagcgcgtgagagttatgagacattccttaatagcattactcacaagtcacaagttcaaaacgtctgactgaaacagaaacaagcctttgttgaagtcttgaagaagagacattagtactcgtcgtatagccataaaaggtaatatacgaaatttcttcgctaatctcttcaccttcctctacgcgtttcactttcactttataaatccaaatctcccttcgaaaacat

SEQ ID NO: 43 - DNA, 1004 bp, Arabidopsis thaliana
  misc_feature (1)..(1004): Ceres Promoter YP0103
gttttgaagaacaatctggatcgaaatctaacataaggtcatcgtattcaagttacgcagtcaaggacttgacatcatcctactctggtctgaggttaccacttccaaagatgggatttttcgactcggtatgcttcctaagaaattcgttttattgaacctagcaaatatcttgtaatgtaagattcctgagatgatgaagaaaaaacaaacttttgttacagcaggagaacggagagaaagaaaacagagaaccaaatgctcttgaagcaaacagaagaagaagacacaaatccaaacttgagacttcttctacaccagaaaaccgcagcattctgggacaacgcaaaacacgaaagtgaaacgggcaatgatatatatgtcttgggtgcgttacaaggcatcgtttgcaactgttgagttggataagtcaactgtcttcttttcctttggttgtagtagctgccttttttttcctttgttgctttaagaaatagcccgaaaaaaagaatgttctacatttcggagcagaaaactaaccgaatgagtttttggtcggatcatcggatcgatcagatatattttgagttacgaactgttataaaaaaagccataattttgtgttgagtttgcaaaataccttataacttgttatttgagattgcacctccatatatattaattcgtaagagtatttattaagtaagctttagtataaatccttttttcctttaaagtaagttaatgttctactaaataatagtaaagttgaagaaccgctccgtttttacaccatgcacgtgttatctaacaaagaaaatatggtacacctaatggctaatgcaaaggacaacacaatgaaactaacttgactctgtgttatagaaacccatagacatctgcatacatcctagtatttgtataaattggactcaaattcctgaggacaatcatagcaaacaatcacatcatcgcaatatacataaacaaaagaggaagaaaaa

SEQ ID NO: 44 - DNA, 1003 bp, Arabidopsis thaliana
  misc_feature (1)..(1003): Ceres Promoter YP0107
taacaatccttgggaacattgcatccatagatatccggttaagatcgatctttgaactcataaaaactagtagattggttggttggtttccatgtaccagaaggcttaccctattagttgaaagttgaaactttgttccctactcaattcctagttgtgtaaatgtatgtatatgtaatgtgtataaaacgtagtacttaaatgactaggagtggttcttgagaccgatgagagatgggagcagaactaaagatgatgacataattaagaacgaatttgaaaggctcttaggtttgaatcctattcgagaatgtttttgtcaaagatagtggcgattttgaaccaaagaaaacatttaaaaaatcagtatccggttacgttcatgcaaatagaaagtggtctaggatctgattgtaattttagacttaaagagtctcttaagattcaatcctggctgtgtacaaaactacaaataatctattttagactatttgggccttaactaaacttccactccattatttactgaggttagagaatagacttgcgaataaacacattccccgagaaatactcatgatcccataattagtcggagggtatgccaatcagatctaagaacacacattccctcaaattttaatgcacatgtaatcatagtttagcacaattcaaaaataatgtagtattaaagacagaaatttgtagacttttttttggcgttaaaagaagactaagtttatacgtacattttattttaagtggaaaaccgaaattttccatcgaaatatatgaatttagtatatatatttctgcaatgtactattttgctattttggcaactttcagtggactactactttattacaatgtgtatggatgcatgagtttgagtatacacatgtctaaatgcatgctttgtaaaacgtaacggaccacaaaagaggatccatacaaatacatctcatagcttcctccattattttccgacacaaacagagca

SEQ ID NO: 45 - DNA, 1024 bp, Arabidopsis thaliana
  misc_feature (1)..(1024): Ceres Promoter YP0110
gggatgcggttccgcttcctcttgatcttggacgagtcggaggacattgttggatcccagtgcaatggtaatataaaacaagaaaacaagagattttataggacaatcactaaatgacatttaattgattaaacatttattcattaataattgtatgttactaacttcaacatttaataattttgtttaagatacgtttacatcagagactattaatatttttacaggttgtaactttaaactttgtcttgaatcgaacatgactatagattttgggcaaacttaaagataacaacatttccgttttttttcaaattattacaaatcaaactgatatattagacacaacacgattacacgtaatgaaaaaagaaaaagataaaaagataaaagaagggatcgattctgtttggtctggtttagtgagattcaaagttaagctcttcctttcaagacatgccttcttaaaccgggaatgtgaacgtttgtaatgtagtccgtccagttaatgcttccaacatcaaatccaaattctctcttctcgtcctctgacatattctccattaatctctggggtattgctgttatcaaatctgtaaaagaaaccaaaaaaaaaagatgaaaactttgcgggtaccggttttgtctgctctaagaattagaatgttaatgagttctgtcttaccttccaccatagaaagtgtatggctcataaatagtagcaaggtgtttggcttgttcaacagatttcttgcatataaactttagcttctgcatcatcttactatccactgaactcataccactcatcaacccactccgttcttgagcatctctccacaaatgatccgagaaatcatcaacggaattgaaaagtttcatcaaacgcaccataataggatcacctttagagtccatgcatggagatgttttgtagtggttataaagaagctccgctaagtcttcgaaaaccagcgggtttatcgccgaagaagcgatctgatacacgtttatttcaggttcc

SEQ ID NO: 46 - DNA, 1024 bp, Arabidopsis thaliana
  misc_feature (1)..(1024): Ceres Promoter YP0111
cgattggatttagtctatacattatagggcgcaagtttgtggatttaagaattatataaaaacttgaaatatatagtttttatgcattctcctcttgtgtaatacataaaccaaatatgagataggttaatctgtatttcagataatattaaattccaaacaatatttttacttgttataagaaggcaattaatatctctctgttaatggcaagtggtaccaagtagtattaaactattaatgcaatggaagagtactgttggaaattataatcctctatcacacattcaaacagatctcctgaaatcttctcttccaaacttgtacttctctgatccaaatgtaggctccaaaatatagacatttaccatttactaagtccacaactcctttcttgtctccttcaaaaatgactcttgtgtaaccaccatatgactccgacagttcggcattgccatgatgagagcttaaaaattcaccttcctgagcatttcaagtcttcactcccttagcttgacctgaaccaagataaaatgcctttgtcgtcccgtaatatccatcctgctttggacggcatcatagttacattcgatccatcctatttacaatgttattttagtattaaaaacatgacaataaatttgttgttaaacatattcaaatacaatatgattggatttataagtaattgtaatatgaaatgtccttagtaatatgttaaaaaatacatagatacacacacgtactaaaagaggcaacgcgggagatgtcattagaggaagaactaggaagcagagcgttcatgcaaaatgctaccaaaaacgttaatgcaatatctcaactaatcagcacagtccatttcatactgagaatgtaaaaaccaatcagcatcgtccattttttcatctaattatttgttaactcttaattggccacaacttccaaccacatgacgctctttctattccctttatatattcccatctcaaatgttcttggagacacaaaatatcataaacatata

SEQ ID NO: 47 - DNA, 996 bp, Arabidopsis thaliana
  misc_feature (1)..(996): Ceres Promoter YP0115
gtcgattggatgatgaacattctacatatataattattatgtttaagcacttagacagcataaattctttctaattatataaatctaaccttgttacattgtacatctataaattacttgaagaaataacgagttctatttctttttaaaaattaaaaatactataccatatctcagtgattaagttgaaccaaaaggtacggaggagaaacaagcatttgattcttccttattttattttattcatctctcactaatgatggtggagaaaaaaagaaaatacctaacaaacaaatatatattgtcatacaaaaatatttctatatttttagttaattagtttatattcctcacttttcagggcttatataagaaagtgagcaaacacaaatcaaaatgcagcagcaaatactatcatcacccatctccttagttctattttataattcctcttctttttgttcatagctttgtaattatagtcttatttctctttaaggctcaataagaggaggtactattactacacttctctctacttttacttgtattttagcattaaaatcctaaaatccgttttaaattcaaaaataaacttagagatgtttaatctcgattcggtttttcggctttaggagaataattatatgaaattagtatggatatctttactagtttccattcaaatgattctgatttcaatctaatactctcactctttaattaaactatatgtagtgtaatttcacactgttaaatttctaccatgtcatgtatattagagttgcatagaaaattgtaaaacatccatttgaattcgaatgaaacaaaatgttttaaaataaaattttggtttttaaaagaaaaatctaaaactgaattatatcgtttaaccaagttgtaaaagtcataaaacgtagtatcttgtaaatcgctcttccacggtccaaatagacttctagtaataaacaagtaaaactaattttggtttcttac

SEQ ID NO: 48 - DNA, 1024 bp, Arabidopsis thaliana
  misc_feature (1)..(1024): Ceres Promoter YP0117
gtcagtgagtcgattggatcacagtcctttatgataaaacaaactcataattattccaccgacaacatgcgttttaaattattttttcttaaattatattatattatattgatatcaacctagctaaaataattcggatggcgaaatcggacaatttttaatagaaaaaatgggtatgaagatagtctatgattccgttcttagcgactagagggacctgctcaaatctcccgggtgatacgcgatgtcaagctcaatagaaccccacaaccgacgagaccgagaaatccttgatttgggctagaagattttgaaataaatttaatatattctaagtaacttgcttaaattttttttcaaactctaaagacataactaacataaagtaaaaaaaaaaaagttaatacatgggaagaaaaaaattaaactaatgattagctctctaacgtgtttaatctcgtatcaagtttttttttaaaaattatattgctattaaaacattgtactattgtttctattttgtttagctattattcttgtgaaatgaaaagttgtgtttattcaattactaaatggcaatatttatcttggaaaactatacctctaattggattaggccctagacatcctctttagcttattgacgttaaaattattcccaaaactattaaagtttagtagtttgaaagatgcatcaagacctactcagataggtaaaagtagaaaactacagttagtgtgattatattttaaaatatataaaacaatcttattaaactaaatattcaagatatatactcaaatggaagataaaaacatttagtctgttaccactaccagcctagctagtcactaatagtcactttggaactgagtagatatttgcatcttgagttaccatggactcaaaagtccaaaaagagaccccgagtgaaaatgctaccaacttaataacaaagaagcatttacagcggtcaaaaagtatctataaatgtttacacaacagtagtcataagcaccattg

SEQ ID NO: 49 - DNA, 999 bp, Arabidopsis thaliana
  misc_feature (1)..(999): Ceres Promoter YP0120
tagtttttgatttaatctacgtttttcttaatcataaatgggtaattattagtttttgcaaaatcaaaatccaaaaattgttctaaacactgcaaccatttaaggcctatatcactcagaaaatttctggtgggagaactaatcgtttgtcctttctaaatctcacatattagaatttagaattagtgtgctacataagaatattagttcagctcggaacaactattttttggtaaaacagagaacttaaacaaatgcattattttatcaacatgcattttgaattgaatataaaatttcataattgtaaagacataaattacataaaattttacatgaaaaaatagatatagaaagaaaatgaaactaactgatgatatgctctctaaattttttaatctcataacaagaattcaaattaattagttcatatttttggttaatataacatttacctgtctaagttggaactttcatttttttctgttttgtttagtcagtattcttaatgtgaaacggaaagttgaatttattcaaacttaaattcaatagcattaattaaaggcgaaagctattatctctacatgtggttcaaactagacatccaatttaattagcttattgacgttgaaatgttttccaaaactactatagtttggcaatttgaaagatgcatcagaactactcagacaggtaaaagtagaacctctagctgtgtgaattgtatgttagtccataaagaacatcttgtaaacttcatacttaagatatatattacaatatatacttgaatggtagataaaaacgattagtctgattgctagcatactcacaactatttggaaatgagtaagatattggcattctagagttactactatggagacaaaagtcgaataaaagagacctcacgtgaaaatgttacgagctagtaaaaaaagcatttacactaacggtaaaaaaagtatctataaatgtttacacaaggtagtagtcatt

SEQ ID NO: 50 - DNA, 999 bp, Arabidopsis thaliana
  misc_feature (1)..(999): Ceres Promoter YP0121
ttggattttttttttgttgagtcagcagaccatctaatctctctttttccaccacagcctgctttctatgaagcatttgggcttacggttgtggaatcaatgacttgtgcactcccaacgtttgctacctgtcatggtggacccgcagagattatcgaaaacggagtttctgggttccacattgacccatatcatccagaccaggttgcagctaccttggtcagcttctttgagacctgtaacaccaatccaaatcattgggttaaaatctctgaaggagggctcaagcgaatctatgaaaggttggcccattctccttgacaggcttaacaatacaacttgtatcgcttcaacaagatgatggcttaataaggatttttgcatgtataggtacacatggaagaagtactcagagagactgcttaccctggctggagtctatgcattctggaaacatgtgtctaagctcgaaaggagagaaacacgacgttacctagagatgttttactcattgaaatttcgtgatttggttagtgtaacccactgttattcttttgatgtctacatctactttacttacattattcttttcttcggtttgcaggccaattcaatcccgctggcaacagatgagaactgatcatgacagggtaggattttatttcctgcactttctttagatcttttgtttgtgttatcttgaataaaaattgttgggttttgtttccttcagtggtttgattttggacttatttgtgttaatgttgttttggctgttctcttaatatcaataacaaataaatttactggttggtatctaagatctaacaatagttactatttttagaggtaaagacaccaaccttgttatattggtcagagagctaaaaccttgacttgttgggaaaacaaaactctaatgacagaaaatctgacatgatgccttataattcacagcctcatgttctacataaatcctaacaatagcactttgtttct

SEQ ID NO: 51 - DNA, 1004 bp, Arabidopsis thaliana
  misc_feature (1)..(1004): Ceres Promoter YP0128
gataaactgataatggaaaagaacaaagaaaccagtttttaactatttgcatatgtaatttatttgttgcaaattatatttagttaaaatgtttcctctatttatatatatatatatcagtcaagcactatgtataagaaatgtcaatttataaatttttacatgtcctttaacagaaagaaaatgaatttttacatgtcattcatagagagtcactcgtttatttcttatatagagaataacacactcacatgcatatgcatgcaatatgatacattttatgacaaagataatcaacggaaacggtcaagacataatttgataaacaacttgcacgatgcacagatctgatcaaatatataactctttaacatatccaaaatattcaaaaagaaaaactcgatccaaactagcaacatcacgctcacgcggtaggctaaaaatttattaatctccaaaagtctttcttatgaacactgcaaacacaacaacttgaaaagtcatataggtttagatgatgacgcgtattggctatcgcttaccggagtggctcataaatacaataaacaatacgtaaaagtcaaagtcaaatatatttagtcaactataaccattaatcgggcaaaacctttagctgtcaaaacaacgtgaaaacgatatttgtatatatcatcaagaatcagtagataagagaatgatttaatcccctgactattacaattttggtgtaataaacagtctctattggtttttattctttgttttaatttctcatgacctatagagagaattaggtagtttcgaaaattggctaatcaacttttgaaaactactgtctactttgcttaaattctctacacttagtttcggataagataattgtcggactaatagttaatcccttgacaatctttgatattataaaaggtttagttaatctcttctctatataaatattcatacaccagctttcaaaaatatataatccaaacaccaaaaacaaa

SEQ ID NO: 52 - DNA, 1001 bp, Arabidopsis thaliana
  misc_feature (1)..(1001): Ceres Promoter YP0137
gtggcacatgctgaaaccccgagcatctctccggaagacacgcgtcgttcgctccaaagaaaacagtcacagctgccggagaatctccgccgtcttcttctgccaccggaaaaactctctccaccactttcagtgcccacctcgtgttatatccactgtatcctcgtagcaccatatcagcctaataaaattttatgtatcaaattttaagacatagccgaaactacactatactagacaataataatatgatttgtttcctgaaaaattatggtttcatgagaaacattaatcatctataaaacaaattagctatggcatcgaagagttatcaatcaaaactgatgaatctttacttaatatatacaacatatctttaccttgcggcggagaagatcggcgagagaagcaccccagccaccgtcactaaaggattcttcagtgatggaatcaccaaagagaaaaaccttccgtctcatcatcttccacacaatcttcttgagaaaatctgagagataagaaaggtgtagtggttttgctgaagtgatcgtgtttgatttagtaaagaaatgctttatttattgttgggggaaacataaataaataaagtaaaagtggatgcactaaatgctttcacccactaatcaccgacctttcatggtttattgtgaaatacactcatagatagacatacaataccttatgtacgtaaataacattttatttgtcgacacttatgtaagtaacgcatagattattttctatgtgattgccactctcagactctcagtttcaaccaataataacaataactacaacaacattaatcataaacatatgctctggtttacaattaaagcttagattaagaaactgtaacaacgttacagaaaaaaaatgttatttacgttttgtaagattagtctctagaatcatcaccgttttttatatattaatgattctttcttatatataaaacctttctcgaaatacccatgaaa

SEQ ID NO: 53 - DNA, 1001 bp, Arabidopsis thaliana
  misc_feature (1)..(1001): Ceres Promoter YP0143
atacaacagatggcagatatcgagttaaatacgtgaatcagccgttacgatattttaaaactagaaaattatttaaaaatattgcaaaataccatttaatttcattgttcataaaaaaaagaaattcaaaaacttaaaaactgattcaaaaatttggattaattctcattaacagtcttcaacactacaacaacatgtttctaatttattttatattttaataattaaacaatatatacgtctgcacattgttgctccgacataatctagtataaaaatagttgcagcatatgtgaaaagcaagcagcatttatcactcaatacttttaattttatctgttgtatgtattaaggttttgtagctttaagaaaacgcttataatataaaataacttctaaaagatatttcatgcgtatacaataaatatttgtgaaaaaacatttcgaaaacgtgtacaatatataaactattgtgttatcttttgacattcaaacaaatgttgacaatgtaattttatccatgatatgattggccaattagctgcgaggtaaaaatccgtatacgagtaaaagtaagataaaatttcgcaagaagatttttagcaggaaatctaagacaagtgtcatgaacgtgtcaatcaacaaacgaaaaggagaattatagaatccagattcgacgtaccacattaataaatatcaaaacattttatgttattttatttttgctctggcagttacactctttttcattgctccaataaaaaaatcactcgcatgcatgcatatatatacaccatagtaaactccgcctcttcttcattttaaaagtatcagtttacactgacacaatccttaactattttcctttgttcttcttcatctttattacacatttttttcaaggtaacaaataatctttttaagtcacttttatactctttaaatcttagattgatatatgaatgcatgttaatatttcaagatttataggtctaccaaac

SEQ ID NO: 54 - DNA, 1003 bp, Arabidopsis thaliana
  misc_feature (1)..(1003): Ceres Promoter YP0144
aaacgttgcaagattattgattgtgagaaagagtgctcaaggtagtactgatttctgtaaagctcacggtggtgggaaacgatgttcttggggagatgggaaatgtgagaaaatttgctagaggaaagaagcggtttatgcgctgcgcataacactattatgtctcgggagaacaaagatggaagcaagagcggtttgattggaccgggactctttagtggccttgtttttggctctacttctgatcattctcagtctggagctagcgctgtctctgattgtactgattctgttgaacgaatacagtttgagaataggcagaagaacaagaagatgatgataccgatgcaggttctagtaccttcatcaatgaaatctccaagtaattcacatgaaggagaaacaaacatctatgacttcatggttccggaggagagagttcacggcggtgggctagtaatgtctttacttggtggctccattgatcgaaactgaaagccatttatggtaaaagtgtcacattctcagcaaaaacctgtgtaaagctgtaaaatgtgtgggaatctccgaatctgtttgtagccggttacgttatgctggatcaaaaactcaagatttgttggatattgttatgctggatcggtggtgaaaccacttcccggttgctaaataaataaacgtttttgttttataatctttttcactaaacggcagtatgggcctttagtgggcttcctttaagcgaccaatacaatcgtcgcaccggaatctactaccatttataggtttattcatgtaaaacctcggaaaatttgagagccacaacggtcaagagacaaaaacaacttgaagataaagggataaggaaggcttcctacatgatggacaacatttctttccacacaaattctcataataaaaatcttataatacaaatacttacgtcataatcattcaatctagtccccatgttttaaggtcctgtttcttgtctgatacaaat

SEQ ID NO: 55 - DNA, 1004 bp, Arabidopsis thaliana
  misc_feature (1)..(1004): Ceres Promoter YP0156
ttggtttgcattgtgaagatttgtattaactatagaacattgaattgatggtgttaagttcttacacaagcgtgcttctcggtttgaactgtttcttttgtatgttgaatcagagcttagtttataggaaccagagtatctacttagtcattctctgatgctaagtgctaaggttctacctagttgccctctaggcccttatgttattgataacttatgaagctatttgaacacttgattcttaggagacctaagttggtacagccagatagagtgtatgttcttgttctctatgtgacaggatcaagctgccacacatagttcaagggtatgctctgtgtgggtttgctcagattgaggacaaatctatacaaggaagtagagtctttgacattttgatgttgtatgataagaagaagaaaggagagtaataaagaaagagaaaagggaaacagaaacacgtgggagaacatcccaaagaggaagcacacgcggatcttcatgcaaagctccccgattctcccatgtggtccctttctccctttgtccccctcctctttcttcttttctcattttactcctttttttaccattatacaacgaatcttttttatcataattttttggttttggtttattttccaataacactttcttggttacttcccattctcactttttcatataagaaactcactttgggaaacttatgtttgagaatgacaagtctttttagagaaagtgatgtaacaaatctaaagtgattatataataaccttgcacaatgtttttgattttttgtaagattcgaatattaggtttattattcgtagggaataaacttactttcaaaagcgttcataagttaatactttcatatatgatcataagtacggacactattgttttttgtttgtttgtgtttattctaaaagaaagtagcttttaattgaaatgtcctcggaggcacagtttaaagttcgagtgtaacagtttctaaggca

SEQ ID NO: 56 - DNA, 1000 bp, Arabidopsis thaliana
  misc_feature (1)..(1000): Ceres Promoter YP0158
ttattagattaatagattgcattgcattgcttgtgctttcaatttacaaattgtctcccaactccatcgacacatctctttttgtgtatataagattcagacttgttatattttttttataaatatgttattagcatcttaagttaaattgattttttatatctgcattaaggattacacgactatatttgcgattgtgtgttggttaaaatataatttaggattgtctttaactacatttaggattatatgactatatttggttaaatataaaatctagctgtgattattagtattcaaaaataagtagcctaaccaattaaaacaacggctattggggcaaattagaacattttagtgtgtccaaaatataatggtcattaggtcatattcctcctagcttcatcgcagcataattgaatgattgccttatttagaagagcttttccactttcccaaaatctaggtgggatctttttgttttgaccttcatttttcttgtttaccatttttagctaaattatttacgattacaaaagatatcaaaagttggatcataatacaatttatagacttactgtagaaaattcgtatgtacaagtacaacaaattcttcataataaattttgaaaattctattacaaatgttgtaagaaatagaatttgaaatatatataaactaaggagaaaaaaaaagagaacatgcattgctctagtcagagtggaccaacatcaacgagataagataacataaaaaccaactcaccataactaaaaacatcccaagagatccaacgattcatatcaaacacaaaaacatcgaacgatcagatttaaaccatctctggtatctccaaaacacaaacacttttttttttcttttgtctgaatggaacaaaagcatgcgacatctctgtgtctttatcttctctctcctcttcttgaaaaactgaacctttaattctttcttcacatctcctttagctttctgaagctgcta

SEQ ID NO: 57 - DNA, 1005 bp, Arabidopsis thaliana
  misc_feature (1)..(1005): Ceres Promoter YP0188
gattggtatgaaatttcggagaccaacaaaaaaaactttattgagcttggagtgaagctatatatatggggcaagatcataatatgtttatatcggccttttcgttaactgaaaataatagttttgagaaatatatcaaatggtaaacagacatcatctttgaaaaataccatcaatgaagttaatattgttattggcatatggtttacccatcttaattttaatgcaaccaaacaaacaagaaacaaaaactgtataagatacaaggtgttttacgattttccgtcttaaaaccgaaatatttttgttcctacgactttaaacggactttgcttaagttgtgtgcatgtaagctcgtcgtccctcgattgtcatcaacattcaccaatatcagcctctatcacacgagtgaaggtggtgattcggcttaatgaaaacagagaaatatttcaatatgattcctattaaattttaaatcttttttctcaatctctagattttcattaaaagcatcatgatttttttccactatgttcatatatctctatcacagttttaggtacattgtagaaattggataagatacgtcatacgtctaacatgaatttggtctagcaaggaaggtttgagataataagtgaaaagaaaacacaagataataaattataatttataaatgctttatagtattgaaaaataagatgattttttttttttttaataccggattggctgatccacttatgatgactcaaatgttattaagtttcaagacaatttatgatgacacaaatcacaatgagtcaatagtagccacgaagccagaaaaaaaaaatgtactacaaaaagataatgatagtacaaaatgatacgtcgtactgccacatgtacgacacaactcgattaccaaaaagcagagccatccaaccataaaactcaaaacacacagattccactggcgtgtgctctcctcacttcactcgtccttgaaacttgaggtactga

SEQ ID NO: 58 - DNA, 1002 bp, Arabidopsis thaliana
  misc_feature (1)..(1002): Ceres Promoter YP0190
taaatagtgacattggtaagaagaaaaaaaacactattaaatagtgaaaaaatggtttataactctcttaattaacattacttattattgctagcacctaaaatctcccacaaaatatttgttgtaaaacacaaatttacaaaatgattttgtttttaaattagtaacacatgttcatatatacgttaataagaacataccctatatgattttatataaaaaaatttctttgagacgtcttattcttttttctttaataatatgcaattgtgagagtttggatttgaatggtagcattagaagcaaacttgaaccaaacatatttcatgaagtcaaacttgaaccaatgtgatcactaatcacagtgttcgcagtgtaaggcatcagaaaatagaagaagggacatagctatgaatcatataatcttgacacatgttttataggttttaggtgtgtatgctaacaaaaaatgagacagctttcttctaatagacttaatatttgggctaaatgtaccacagttgtgaatttcttacaaaaatgggccgagctacaaaaaactacaggcccactctcaactcttatcaaacgacagcgttttacttttttaaaagcacacactttttgtttggtgtcggtgacggtgagtttcgtccgctcttcctttaaattgaagcaacggttttgatccgatcaaatccaacggtgctgattacacaaagcccgagacgaaaacgttgactattaagttaggttttaatctcagccgttaatctacaaatcaacggttccctgtaaaacgaatcttccttccttcttcacttccgcgtcttctctctcaatcacctcaaaaaaatcgatttcatcaaaatattcacccgcccgaatttgactctccgatcatcgtctccgaatctagatcgacgagatcaaaaccctagaaatctaaatcggaatgagaaattgattttgatacgaattagggatctgtgtgttgaggac

SEQ ID NO: 59 - DNA, 995 bp, Arabidopsis thaliana
  misc_feature (1)..(995): Ceres Promoter YP0212
agtcgattggtacactcttaatttaattagagtaagagatcaacaaaaatatagaattttctttatatcgaagtgctacgaccttatatatatagaaaaaaaagcataggtgaatctctaaattgagattgtgctgtagtaaacatattaagtttttagtttttttaagaaatgaatctttttgttgattaattcaaactagtagtcattaagattccggagattccaatttagaaaagtcaaagattcaaagaacaagtccaggtccacatgttgaatccgattcatcatccactcatccttcatatcttcctccaccgtctccgcccaaaaaatcaataacaataaaaaatcctaaaaaaacatatttgattttgaaaaaactttatcatatattatattaattaaatagttatccgatgactcatcctatggtcagggccttgctgtctctgacgtccttaattatcattatttttaaatttgtctctctcagaaaattacgccacaatcttcctctttcccttttccgaaaacagctaatatttgtggacctaaactaaataacgtagcctctagattttatataattactaatactatatgctactacttgttattatttactccaatcatatatgataccaatcaagaatcactacataagtagaaaactttgcaatgagtccattaattaaaattaagaataaacttaaaattttatggtattttaagattccctttggattgtaatgacaagaaatcagcaaattagtcgtaactcgtaagaataaacaagatcaatttttactttctttacaaagattccgttgtaattttagaaatttttttttgtcactgtttttttatagattaatttatctgcatcaatccgattaagaagtgtacacatgggcatctatatatatctaacaggtaaaacgtgtatgtacatgcataaggttttacgtgcttctataaatatatgtggcagt

SEQ ID NO: 60 - DNA, 1024 bp, Arabidopsis thaliana
  misc_feature (1)..(1024): Ceres Promoter YP0214
ccagtcgattggcgcctcgcatgcctatcatatttaaccgtcaataatggatttggcggttttggtaggccgggtcaaccggattaaaagaaaacggtttggagtccttccttgcaattgaattttcacacattcgggttttgtgatttctctgtcataatgggcccggcacatatggttcataacccatgtgggcctatggtataatttttccaattaaaactattgttaggtcgataaaacaaaaaacaataaaaacgagtggaatacacataccaaaaagaatgtgatgaacattagtaattttattttgatggttaatgaaaaacaaaataaatgcatcttggcatcttccgttggaaagcgcaaatagggcagattttcagacagatatcactatgatggggggtgagagaaagaaaacgaggcgtacctaatgtaacactacttaattagtcgttagttataggactttttttttgtttgggcctagttataggatcataaggtaaaaatgaagaatgaatattagattagtaggagctaatgatggagttaagtatgcacgtgtaagaactgggaagtgaaacctcctgtatggtgaagaaactatacaacaaagccctttgttggtgtatacgtattaatttttattcttttatcacaagcgatacgtatcttaagacataataaatatatatcttactcataataaatatcttaagatatatatacagtatacacctgtatatatataataaataggcatatagtagaaattaatatgagttgttgttgttgcaaatatataaatcaatcaaaagatttaaaacccaccattcaatcttggtaagtaacgaaaaaaaagggaagcaagaagaaccacagaaaagggggctaacaactagacacgtagatcttcatctgcccgtccatctaacctaccacactctcatcttctttttcccgtgtcagtttgttatataagctctcactctccggtatatttccccattgcactgga

SEQ ID NO: 61 - DNA, 911 bp, Arabidopsis thaliana
  misc_feature (1)..(911): Ceres Promoter YP0263
atctagctgtggattccaccaaaattctggcagggccatgatctaaaaactgagactgcgcgtgttgttttgcagtgatttgtatttcatatttgcaccatcctacacagtccacttggtatcgtaaccaaacataaggagaacctaattacattattgttttaatttcgtcaaactggtttttaccttttagttacatagttgattcttcatttgttttagtagttatggagcacaataatgtgcaacaaagaaagatcatagtggattaatatgttgagaggtcagaaattcttggttaacaaaaaaaagttacaaggactgagattttgggtgggagaaagccatagcttttaaaacatgattgaacttaaaagtgatgttatggtttgaggggaaaaaggttgatgtcaactaagatagttgaagtaatgtcttaaactaaagtaaaccaccggtccaaccgtggtccggaagcatctctggtatgatttatcctaaaaatcaaaatagtagaaacatactttaaatatatacattgatcggacgaaaattgtaaactagtatagtttcaaaaactagttgaacaggttatgtaccttaaacatttatttcaaacttaaacactaaagaacatatatgaatagaagtttatataaattactatatatctaccataaatctcttataattatgatgtcacgatgaggaagtgttgaaacgttaaaatgccaaaatataagcatgcgacggaattttggcagaagattgtagagttgtaatctgtcgcaatcattactcgtgctagcatttttcattttcccttcatttgtggataacgcacgatataacattctacacaccaacaagattctataaaaacgcaaaggttgtctccatagaatatcgtc

SEQ ID NO: 62 - DNA, 999 bp, Arabidopsis thaliana
  misc_feature (1)..(999): Ceres Promoter YP0275
aaacattaatatgtagtaactatgggcgtatgctttactttttaaaatgggcctatgctataattgaatgacaaggattaaacaactaataaaattgtagatgggttaagatgacttatttttttacttaccaatttataaatgggcttcgatgtactgaaatatatcgcgcctattaacgaggccattcaacgaatgttttaagggccctatttcgacattttaaagaacacctaggtcatcattccagaaatggatattataggatttagataatttcccacgtttggtttatttatctattttttgacgttgaccaacataatcgtgcccaaccgtttcacgcaacgaatttatatacgaaatatatatatttttcaaattaagataccacaatcaaaacagctgttgattaacaaagagattttttttttttggttttgagttacaataacgttagaggataaggtttcttgcaacgattaggaaatcgtataaaataaaatatgttataattaagtgttttattttataatgagtattaatataaataaaacctgcaaaaggatagggatattgaataataaagagaaacgaaagagcaattttacttctttataattgaaattatgtgaatgttatgtttacaatgaatgattcatcgttctatatattgaagtaaagaatgagtttattgtgcttgcataatgacgttaacttcacatatacacttattacataacatttatcacatgtgcgtctttttttttttttactttgtaaaatttcctcacttttaagacttttataacaattactagtaaaataaagttgcttggggctacaccctttctccctccaacaactctatttatagataacattatatcaaaatcaaaacatagtccctttcttctataaaggttttttcacaaccaaatttccattataaatcaaaaaataaaaacttaattagtttttacagaagaaaagaaaaca

SEQ ID NO: 63 - DNA, 981 bp, Arabidopsis thaliana
  misc_feature (1)..(981): Ceres Promoter YP0285
gggattatatatgatagacgattgtatttgcgggacattgagatgtttccgaaaatagtcatcaaatatcaaaccagaatttgatgtgaaaacactaattaaaacatataattgacaactagactatatcatttgttaagttgagcgttgaaagaaaatgaaagagtgtagactgtagtacgtatgagtttcccaaaagatggtgcttgaatattattgggaagagactttggttggttcggttgaatgaagatttttacctgccatgttgatagagaaaggcaaataaatgtaggggtcgatgtctaacgtaaagactggatcaaccaagagtcctcctcctcgtcttcaccaaaaaaaaagagtcctcctcgtggaaacttatttcttctccagccaagatctcatctcatctcttcactctatgaaatataaaggaatcttatggtttttctaaaaactatagtacgtctatataccaaaggaaacaatataaaatcagttaatctgataaattttgagtaaataataaagttaactttgtacttacctatatcaaactaattcacaaaataaagtaataataacaaagaatttttagtagatccacaatatacacacacactatgagaaatcataatagagaattttaatgattttgtctaactcatagcaacaagtcgctttggccgagtggttaaggcgtgtgcctgctaagtacatgggctctgcccgcgagagttcgaatctctcaggcgacgtttcttttgttttcggccataaaggaaaaagcccaattaacacgtctcgcttataagcccataaagcaaacaatgggctgtctctgtctcactcacacacgcgttttcctactttttgactatttttataaccggcgggtctgacttaattagggttttctttaataatcagacactctctcactcgtttcgtcaacattgaacacagacaaaaccgcgt

SEQ ID NO: 64 - DNA, 996 bp, Arabidopsis thaliana
  misc_feature (1)..(996): Ceres Promoter YP0286
gaaaacaatcataggttacgctattatcatcgaaaggtatgtgatgcatattcccattgaaccagatttccatatattttatttgtaaagtgataatgaatcacaagatgattcaatattaaaaatgggtaactcactttgacgtgtagtacgtggaagaatagttagctatcacgcatacatatatctatgaataagtgtgtatgacataagaaactaaaatatttacctaaagtccagttactcatactgatttcatgcatatatgtattatttatttatttttaataaagaagcgattggtgttttcatagaaatcatgatagattgataggtatttcagttccacaaatctagatctgtgtgctatacatgcatgtattaattttttccccttaaatcatttcagttgataatattgctctttgttccaactttagaaaaggtatgaaccaacctgacgattaacaagtaaacattaattaatctttatatgagataaaaccgaggatatatatgattgtgttgctgtctattgatgatgtgtcgatattatgcttgttgtaccaatgctcgagccgagcgtgatcgatgccttgacaaactatatatgtttcccgaattaattaagttttgtatcttaattagaataacatttttatacaatgtaatttctcaagcagacaagatatgtatcctatattaattactatatatgaattgccgggcacctaccaggatgtttcaaatacgagagcccattagtttccacgtaaatcacaatgacgcgacaaaatctagaatcgtgtcaaaactctatcaatacaataatatatatttcaagggcaatttcgacttctcctcaactcaatgattcaacgccatgaatctctatataaaggctacaacaccacaaaggatcatcagtcatcacaaccacattaactcttcaccactatctctcaatctctcgtttcatttcttgacgcgtgaaaa

SEQ ID NO: 65 - DNA, 1000 bp, Arabidopsis thaliana
  misc_feature (1)..(1000): Ceres Promoter YP0337
taatttttttatttttggaactaacacttattagtttaggtttccatcacctatttaattcgtaattcttatacatgcatataatagagatacatatatacaaatttatgatcatttttgcacaacatgtgatctcattcattagtatgcattatgcgaaaacctcgacgcgcaaaagacacgtaatagctaataatgttactcatttataatgattgaagcaagacgaaaacaacaacatatatatcaaattgtaaactagatatttcttaaaagtgaaaaaaaacaaagaaatataaaggacaattttgagtcagtctcttaatattaaaacatatatacataaataagcacaaacgtggttacctgtcttcatgcaatgtggactttagtttatctaatcaaaatcaaaataaaaggtgtaatagttctcgtcatttttcaaattttaaaaatcagaaccaagtgatttttgtttgagtattgatccattgtttaaacaatttaacacagtatatacgtctcttgagatgttgacatgatgataaaatacgagatcgtctcttggttttcgaattttgaactttaatagttttcttttttagggaaactttaatagttgtttatcataagattagtcacctaatggttacgttgcagtaccgaaccaattttttacccttttttctaaatgtggtcgtggcataatttccaaaagagatccaaaacccggtttgctcaactgataagccggtcggttctggtttgaaaaacaagaaataatctgaaagtgtgaaacagcaacgtgtctcggtgtttcatgagccacctgccacctcattcacgtcggtcattttgtcgtttcacggttcacgctctagacacgtgctctgtccccaccatgactttcgctgccgactcgcttcgctttgcaaactcaaacatgtgtgtatatgtaagtttcatcctaataagcatctcttaccacattaattaaaaa

SEQ ID NO: 66 - DNA, 1000 bp, Arabidopsis thaliana
  misc_feature (1)..(1000): Ceres Promoter YP0356
ttagttcattgaaacgtcaactttttacttgcaaccactttgtaggaccattaactgcaaaataagaattctctaagcttcacaaggggttcgtttggtgctataaaaacattgttttaagaactggtttactggttctataaatctataaatccaaatatgaagtatggcaataataataacatgttagcacaaaaaatactcattaaattcctacccaaaaaaaatctttatatgaaactaaaacttatatacacaataatagtgatacaaagtaggtcttgatattcaactattcgggattttctggtttcgagtaattcgtataaaaggtttaagatctattatgttcactgaaatcttaactttgttttgtttccagttttaactagtagaaattgaaatttttaaaaattgttacttacaataaaatttgaatcaatatccttaatcaaaggatcttaagactagcacaattaaaacatataacgtagaatatctgaaataactcgaaaatatctgaactaagttagtagttttaaaatataatcccggtttggaccgggcagtatgtacttcaatacttgtgggttttgacgattttggatcggattgggcgggccagccagattgatctattacaaatttcacctgtcaacgctaactccgaacttaatcaaagattttgagctaaggaaaactaatcagtgatcacccaaagaaaacattcgtgaataattgtttgctttccatggcagcaaaacaaataggacccaaataggaatgtcaaaaaaaagaaagacacgaaacgaagtagtataacgtaacacacaaaaataaactagagatattaaaaacacatgtccacacatggatacaagagcatttaaggagcagaaggcacgtagtggttagaaggtatgtgatataattaatcggcccaaatagattggtaagtagtagccgtctatatcatccatactcatcataacttcaacct

SEQ ID NO: 67 - DNA, 1000 bp, Arabidopsis thaliana
  misc_feature (1)..(1000): Ceres Promoter YP0374
aagacacccgtaaatgttgtcatgtagaagaaactagaaacgttaaacgcatcaaatcaagaaattaaattgaaggtaatttttaacgccgcctttcaaatattcttcctaggagaggctacaagacgcgtatttctttcgaattctccaaaccattaccattttgatatataataccgacatgccgttgataaagtttgtatgcaaatcgttcattgggtatgagcaaatgccatccattggttcttgtaattaaatggtccaaaaatagtttgttcccactactagttactaatttgtatcactctgcaaaataatcatgatataaacgtatgtgctatttctaattaaaactcaaaagtaatcaatgtacaatgcagagatgaccataaaagaacattaaaacactacttccactaaatctatggggtgccttggcaaggcaattgaataaggagaatgcatcaagatgatatagaaaatgctattcagtttataacattaatgttttggcggaaaattttctatatattagacctttctgtaaaaaaaaaaaaatgatgtagaaaatgctattatgtttcaaaaatttcgcactagtataatacggaacattgtagtttacactgctcattaccatgaaaaccaaggcagtatataccaacattaataaactaaatcgcgatttctagcacccccattaattaattttactattatacattctctttgcttctcgaaataataaacttctctatatcattctacataataaataagaaagaaatcgacaagatctaaatttagatctattcagctttttcgcctgagaagccaaaattgtgaatagaagaaagcagtcgtcatcttcccacgtttggacgaaataaaacataacaataataaaataataaatcaaatatataaatccctaatttgtctttattactccacaattttctatgtgtatatatatacccacctctctcttgtgtatttg

SEQ ID NO: 68 - DNA, 998 bp, Arabidopsis thaliana
  misc_feature (1)..(998): Ceres Promoter YP0377
tataaaccattcctataacaccatatttaaacataacaatgaattgcttggatttcaaactttattaaatttggattttaaattttaatttgattgaattatacccccttaattggataaattcaaatatgtcaactttttttttgtaagatttttttatggaaaaaaaaattgattattcactaaaaagatgacaggttacttataatttaatatatgtaaaccctaaaaagaagaaaatagtttctgttttcactttaggtcttattatctaaacttctttaagaaaatcgcaataaattggtttgagttctaactttaaacacattaatatttgtgtgctatttaaaaaataatttacaaaaaaaaaaacaaattgacagaaaatatcaggttttgtaataagatatttcctgataaatatttagggaatataacatatcaaaagattcaaattctgaaaatcaagaatggtagacatgtgaaagttgtcatcaatatggtccacttttctttgctctataacccaaaattgaccctgacagtcaacttgtacacgcggccaaacctttttataatcatgctatttatttccttcatttttattctatttgctatctaactgatttttcattaacatgataccagaaatgaatttagatggattaattcttttccatccacgacatctggaaacacttatctcctaattaaccttactttttttttagtttgtgtgctccttcataaaatctatattgtttaaaacaaaggtcaataaatataaatatggataagtataataaatctttattggatatttctttttttaaaaaagaaataaatcttttttggatattttcgtggcagcatcataatgagagactacgtcgaaaccgctggcaaccacttttgccgcgtttaatttctttctgaggcttatataaatagatcaaaggggaaagtgagatataatacagacaaaacaagagaaaaga

SEQ ID NO: 69 - DNA, 999 bp, Arabidopsis thaliana
  misc_feature (1)..(999): Ceres Promoter YP0380
acaagtaccattcacttttttacttttcaatgtatacaatcatcatgtgataaaaaaaaaaatgtaaccaatcaacacactgagatacggccaaaaaatggtaatacataaatgtttgtaggttttgtaatttaaatactttagttaagttatgattttattatttttgcttatcacttatacgaaatcatcaatctattggtatctcttaatcccgctttttaatttccaccgcacacgcaaatcagcaaatggttccagccacgtgcatgtgaccacatattgtggtcacagtactcgtcctttttttttcttttgtaatcaataaatttcaatcctaaaacttcacacattgagcacgtcggcaacgttagctcctaaatcataacgagcaaaaaagttcaaattagggtatatgatcaattgatcatcactacatgtctacataattaatatgtattcaaccggtcggtttgttgatactcatagttaagtatatatgtgctaattagaattaggatgaatcagttcttgcaaacaactacggtttcatataatatgggagtgttatgtacaaaatgaaagaggatggatcattctgagatgttatgggctcccagtcaatcatgttttgctcgcatatgctatcttttgagtctcttcctaaactcatagaataagcacgttggttttttccaccgtcctcctcgtgaacaaaagtacaattacattttagcaaattgaaaataaccacgtggatggaccatattatatgtgatcatattgcttgtcgtcttcgttttcttttaaatgtttacaccactacttcctgacacgtgtccctattcacatcatccttgttatatcgttttacttataaaggatcacgaacaccaaaacatcaatgtgtacgtcttttgcataagaagaaacagagagcattatcaattattaacaattacacaagacagcgagattgtaaaagagtaagagagagag

SEQ ID NO: 70 - DNA, 1000 bp, Arabidopsis thaliana
  misc_feature (1)..(1000): Ceres Promoter YP0381
cacggtcaaagtattgctaacatggtcattacattgaaaaagaaaattaattgtctttactcatgtttattctatacaaataaaaatattaaccaaccatcgcactaacaaaatagaaatcttattctaatcacttaattgttgacaattaaatcattgaaaaatacacttaaatgtcaaatattcgttttgcatacttttcaatttaaatacatttaaagttcgacaagttgcgtttactatcatagaaaactaaatctcctaccaaagcgaaatgaaactactaaagcgacaggcaggttacataacctaacaaatctccacgtgtcaattaccaagagaaaaaaagagaagataagcggaacacgtggtagcacaaaaaagataatgtgatttaaattaaaaaacaaaaacaaagacacgtgacgacctgacgctgcaacatcccaccttacaacgtaataaccactgaacataagacacgtgtacgatcttgtctttgttttctcgatgaaaaccacgtgggtgctcaaagtccttgggtcagagtcttccatgattccacgtgtcgttaatgcaccaaacaagggtactttcggtattttggcttccgcaaattagacaaaacagctttttgtttgattgatttttctcttctctttttccatctaaattctctttgggctcttaatttctttttgagtgttcgttcgagatttgtcggagattttttcggtaaatgttgaaattttgtgggatttttttttatttctttattaaacttttttttattgaatttataaaaagggaaggtcgtcattaatcgaagaaatggaatcttccaaaatttgatattttgctgttttcttgggatttgaattgctctttatcatcaagaatctgttaaaatttctaatctaaaatctaagttgagaaaaagagagatctctaatttaaccggaattaatattctccgaccgaagttattatgttgcaggct

SEQ ID NO: 71 - DNA, 999 bp, Arabidopsis thaliana
  misc_feature (1)..(999): Ceres Promoter YP0384
tttaaaaaattggataaaacaccgataaaaattcacatttgcaaattttattcagtcggaatatatatttgaaacaagttttgaaatccattggacgattaaaattcattgttgagaggataaatatggatttgttcatctgaaccatgtcgttgattagtgattgactaccatgaaaaatatgttatgaaaagtataacaacttttgataaatcacatttattaacaataaatcaagacaaaatatgtcaacaataatagtagtagaagatattaattcaaattcatccgtaacaacaaaaaatcataccacaattaagtgtacagaaaaaccttttggatatatttattgtcgcttttcaatgattttcgtgaaaaggatatatttgtgtaaaataagaaggatcttgacgggtgtaaaaacatgcacaattcttaatttagaccaatcagaagacaacacgaacacttctttattataagctattaaacaaaatcttgcctattttgcttagaataatatgaagagtgactcatcagggagtggaaaatatctcaggatttgcttttagctctaacatgtcaaactatctagatgccaacaacacaaagtgcaaattcttttaatatgaaaacaacaataatatttctaatagaaaattaaaaagggaaataaaatatttttttaaaatatacaaaagaagaaggaatccatcatcaaagttttataaaattgtaatataatacaaacttgtttgcttccttgtctctccctctgtctctctcatctctcctatcttctccatatatacttcatcttcacacccaaaactccacacaaaatatctctccctctatctgcaaattttccaaagttgcatcctttcaatttccactcctctctaatataattcacattttcccactattgctgattcatttttttttgtgaattatttcaaacccacataaaaaaatctttgtttaaatttaaaacca

SEQ ID NO: 72 - DNA, 998 bp, Arabidopsis thaliana
  misc_feature (1)..(998): Ceres Promoter YP0385
actcaacaataggacaagccaaaaaaattccaattattgtgttactctattcttctaaatttgaacactaatagactatgacatatgagtatataatgtgaagtcttaagatattttcatgtgggagatgaataggccaagttggagtctgcaaacaagaagctcttgagccacgacataagccaagttgatgaccgtaattaatgaaactaaatgtgtgtggttatatattagggacccatggccatatacacaatttttgtttctgtcgatagcatgcgtttatatatatttctaaaaaaactaacatatttactggatttgagttcgaatattgacactaatataaactacgtaccaaactacatatgtttatctatatttgattgatcgaagaattctgaactgttttagaaaatttcaatacacttaacttcatcttacaacggtaaaagaaatcaccactagacaaacaatgcctcataatgtctcgaaccctcaaactcaagagtatacattttactagattagagaatttgatatcctcaagttgccaaagaattggaagcttttgttaccaaacttagaaacagaagaagccacaaaaaaagacaaagggagttaaagattgaagtgatgcatttgtctaagtgtgaaaggtctcaagtctcaactttgaaccataataacattactcacactccctttttttttctttttttttcccaaagtaccctttttaattccctctataacccactcactccattccctctttctgtcactgattcaacacgtggccacactgatgggatccacctttcctcttacccacctcccggtttatataaacccttcacaacacttcatcgctctcaaaccaactctctcttctctcttctctcctctcttctacaagaagaaaaaaaacagagcctttacacatctcaaaatcgaacttactttaaccaccaaatactgattgaacacacttgaaa

SEQ ID NO: 73 - DNA, 1000 bp, Arabidopsis thaliana
  misc_feature (1)..(1000): Ceres Promoter YP0396
catagtaaaagtgaatttaatcatactaagtaaaataagataaaacatgttatttgaatttgaatatcgtgggatgcgtatttcggtatttgattaaaggtctggaaaccggagctcctataacccgaataaaaatgcataacatgttcttccccaacgaggcgagcgggtcagggcactagggtcattgcaggcagctcataaagtcatgatcatctaggagatcaaattgtatgtcggccttctcaaaattacctctaagaatctcaaacccaatcatagaacctctaaaaagacaaagtcgtcgctttagaatgggttcggtttttggaaccatatttcacgtcaatttaatgtttagtataatttctgaacaacagaattttggatttatttgcacgtatacaaatatctaattaataaggacgactcgtgactatccttacattaagtttcactgtcgaaataacatagtacaatacttgtcgttaatttccacgtctcaagtctataccgtcatttacggagaaagaacatctctgtttttcatccaaactactattctcactttgtctatatatttaaaattaagtaaaaaagactcaatagtccaataaaatgatgaccaaatgagaagatggttttgtgccagattttaggaaaagtgagtcaaggtttcacatctcaaatttgactgcataatcttcgccattaacaacggcattatatatgtcaagccaattttccatgttgcgtacttttctattgaggtgaaaatatgggtttgttgattaatcaaagagtttgcctaactaatataactacgactttttcagtgaccattccatgtaaactctgcttagtgtttcatttgtcaacaatattgtcgttactcattaaatcaaggaaaaatatacaattgtataattttcttatattttaaaattaattttgatgtattacccctttataaataggctatcgctacaacaccaataac

SEQ ID NO: 74 - DNA, 1514 bp, Arabidopsis thaliana
  misc_feature (1)..(1514): Ceres Promoter p13879
tttcgatcctcttcttttttaggtttcttgatttgatgatcgccgccagtagagccgtcgtcggaagtttcagagattaaaaccatcaccgtgtgagttggtagcgaattaacggaaagtctaagtcaagattttttaaaaagaaatttatgtgtgaaaagaagccgttgtgtatatttatataatttagaaaatgtttcatcattttaattaaaaaattaataatttgtagaagaaagaagcattttttatacataaatcatttaccttctttactgtgtttttcttcacttacttcatttttacttttttacaaaaaagtgaaaagtaaattacgtaattggtaacataaattcactttaaatttgcatatgttttgttttcttcggaaactatatcgaaaagcaaacggaaagaacttcacaaaaaaccctagctaactaaagacgcatgtgttcttcttattcttcatatatcctctgtttcttgtgttctgttttgagtcttacattttcaatatctgactctgattactatatctaaaagggaacatgaagaacttgagaccatgttaaactgtacaatgccttcaaacatggctaactaaagatacattagatggctttacagtgtgtaatgcttattatctttaggttttttaaatcccttgtattaagttatttaccaaattatgttcttgtactgcttattggcttggttgttgtgtgctttgtaaacaacacctttggctttatttcatcctttgtaaacctactggtctttgttcagctcctcttggaagtgagtttgtatgcctggaacgggttttaatggagtgtttatcgacaaaaaaaaaatgtagcttttgaaatcacagagagtagttttatattcaaattacatgcatgcaactaagtagcaacaaagttgatatggccgagttggtctaaggcgccagattaaggttctggtccgaaagggcgtgggttcaaatcccactgtcaacattctctttttctcaaattaatatttttctgcctcaatggttcaggcccaattatactagactactatcgcgactaaaatagggactagccgaattgatccggcccagtatcagttgtgtatcaccacgttatttcaaatttcaaactaagggataaagatgtcatttgacatatgagatatttttttgctccactgagatatttttctttgtcccaagataaaatatcttttctcgcatcgtcgtctttccatttgcgcattaaaccaaaaagtgtcacgtgatatgtccccaaccactacgaattttaactacagatttaaccatggttaaaccagaattcacgtaaaccgactctaaacctagaaaatatctaaaccttggttaatatctcagcccccttataaataacgagacttcgtctacatcgttctacacatctcactgctcactactctcactgtaatcccttagatcttcttttcaaatttcaccattgcactggatg

SEQ ID NO: 75 - DNA, 1954 bp, Arabidopsis thaliana
  misc_feature (1)..(1954): Ceres Promoter p326
gtgggtaaaagtatccttctttgtgcatttggtatttttaagcatgtaataagaaaaaccaaaatagacggctggtatttaataaaaggagactaatgtatgtatagtatatgatttgtgtggaatataataaagttgtaaaatatagatgtgaagcgagtatctatcttttgactttcaaaggtgatcgatcgtgttctttgtgatagttttggtcgtcggtctacaagtcaacaaccaccttgaagttttcgcgtctcggtttcctcttcgcatctggtatccaatagcatacatataccagtgcggaaaatggcgaagactagtgggcttgaaccataaggtttggccccaatacggattccaaacaacaagcctagcgcagtcttttgggatgcataagactaaactgtcgcagtgatagacgtaagatatatcgacttgattggaatcgtctaagctaataagtttaccttgaccgtttatagttgcgtcaacgtccttatggagattgatgcccatcaaataaacctgaaaatccatcaccatgaccaccataaactcccttgctgccgctgctttggcttgagcaaggtgtttccttgtaaagctccgatctttggataaagtgttccactttttgcaagtagctctgacccctctcagagatgtcaccggaatcttagacagaacctcctctgccaaatcacttggaagatcggacaatgtcatcatttttgcaggtaatttctccttcgttgctgctttggcttgagcacggtgcttctttgtaaagctccgatctttggataagagcggatcggaatcctctaggaggtgccagtcccttgacctattaatttatagaaggttttagtgtattttgttccaatttcttctctaacttaacaaataacaactgcctcatagtcatgggcttcaaattttatcgcttggtgtatttcgttatttgcaaggccttggcccattttgagcccaataactaaatctagccttttcagaccggacatgaacttcgcatattggcgtaactgtgcagttttacctttttcggatcagacaagatcagatttagaccacccaacaatagtcagtcatatttgacaacctaagctagccgacactactaaaaagcaaacaaaagaagaattctatgttgtcattttaccggtggcaagtggacccttctataaaagagtaaagagacagcctgtgtgtgtataatctctaattatgttcaccgacacaatcacacaaacccttctctaatcacacaacttcttcatgatttacgacattaattatcattaactctttaaattcactttacatgctcaaaaatatctaatttgcagcattaatttgagtaccgataactattattataatcgtcgtgattcgcaatcttcttcattagatgctgtcaagttgtactcgcacgcggtggtccagtgaagcaaatccaacggtttaaaaccttcttacatttctagatctaatctgaaccgtcagatatctagatctcattgtctgaacacagttagatgaaactgggaatgaatctggacgaaattacgatcttacaccaaccccctcgacgagctcgtatatataaagcttatacgctcctccttcaccttcgtactactactaccaccacatttctttagctcaaccttcattactaatctccttttaaggtatgttcacttttcttcgattcatactttctcaagattcctgcatttctgtagaatttgaaccaagtgtcgatttttgtttgagagaagtgttgatttatagatctggttattgaatctagattccaatttttaattgattcgagtttgttatgtgtgtttatactacttctcattgatcttgtttgatttctctgctctgtattaggtttctttcgtgaatcagatcggaa

SEQ ID NO: 76 - DNA, 2016 bp, Arabidopsis thaliana
  misc_feature (1)..(2016): Ceres Promoter p32449
gatcggccttcttcaggtcttctctgtagctctgttacttctatcacagttatcgggtatttgagaaaaaagagttagctaaaatgaatttctccatataatcatggtttactacaggtttacttgattcgcgttagctttatctgcatccaaagttttttccatgatgttatgtcatatgtgataccgttactatgtttataactttatacagtctggttcactggagtttctgtgattatgttgagtacatactcattcatcctttggtaactctcaagtttaggttgtttgaattgcctctgttgtgatacttattgtctattgcatcaatcttctaatgcaccaccctagactatttgaacaaagagctgtttcattcttaaacctctgtgtctccttgctaaatggtcatgctttaatgtcttcacctgtctttctcttctatagatatgtagtcttgctagatagttagttctacagctctcttttgtagtcttgttagagagttagttgagatattacctcttaaaagtatccttgaacgctttccggttatgaccaatttgttgtagctccttgtaagtagaacttactgggaccagcgagacagtttatgtgaatgttcatgcttaagtgtcgaacgtatctatctctactatagctctgtagtcttgttagacagttagttttatatctccatttttttgtagtcttgctagttgagatattacctcttctcttcaaagtatccttgaacgctcaccggttatgaaatctctacactatagctctgtagtcttgctagatagttagttctttagctctctttttgtagcctagttctttagctctccttttgtagccttgctacagagtaagatgggatattacctccttgaacgctctccggttatgaccaatttgttgtagctccttgtaagtagaacttaggatagagtgagtcaactttaagaaagaacctagtatgtggcataaccagattgcaggctctgtctcggctacagtaacgtaactctatagctctttgttttgttcagaaagaaccagtgattggatgattcgtccttagaaactggacctaacaacagtcattggctttgaaatcaagccacaacaatgcctatatgaaccgtccatttcatttatccgtttcaaaccagcccattacatttcgtcccattgataaccaaaagcggttcaatcagattatgttttaattttaccaaattctttatgaagtttaaattatactcacattaaaaggattattggataatgtaaaaattctgaacaattactgattttggaaaattaacaaatattctttgaaatagaagaaaaagcctttttccttttgacaacaacatataaaatcatactcccattaaaaagattttaatgtaaaattctgaatataagatattttttacaacaacaaccaaaaatatttatttttttccttttttacagcaacaagaaggaaaaacttttttttttgtcaagaaaaggggagattatgtaaacagataaaacagggaaaataactaaccgaactctcttaattaacatcttcaaataaggaaaattatgatccgcatatttaggaagatcaatgcattaaaacaacttgcacgtggaaagagagactatacgctccacacaagttgcactaatggtacctctcacaaaccaatcaaaatactgaataatgccaacgtgtacaaattagggttttacctcacaaccatcgaacattctcgaaacattttaaacagcctggcgccatagatctaaactctcatcgaccaatttttgaccgtccgatggaaactctagcctcaacccaaaactctatataaagaaatcttttccttcgttattgcttaccaaatacaaaccctagccgccttattcgtcttcttcgttctctagttttttcctcagtctctgttcttagatcccttgtagtttccaaatcttccgataaggcct

SEQ ID NO: 77 - DNA, 667 bp, Arabidopsis thaliana
  misc_feature (1)..(667): Ceres Promoter PD1367
acagttttcttttctcatcttacaacaagtttccaggaggatagagacataaacgaagctcggattgtatcgttctttttagcttttattcacatccgaaagtcctgtagtttagattctgttatcttgcggttttgagttaatcagaaacagagtaatcaatgtaatgttgcaggctagatctttcatctttggaaatttgtttttttctcatgcaatttctttagcttgaccatgagtgactaaaagatcaatcagtagcaatgatttgatttggctaagagacatttgtccacttggcatcttgatttggatggttacaacttgcaagacccaattggatacttgctatgacaactccaactcaagagtgtcgtgtaactaagaaccttgactaatttgtaatttcaatcccaagtcatgttactatatgtttttttgtttgtattattttctctcctacaattaagctctttgacgtacgtaatctccggaaccaactcctatatccaccatttactccacgttgtctccaattattggacgttgaaacttgacacaacgtaaacgtatctacgtggttgattgtatgtacatatgtacaaacgtacacctttctcctctttcacttcatcacttggcttgtgaattcattaattcctgcgaa

SEQ ID NO: 78 - DNA, 1064 bp, Arabidopsis thaliana
  misc_feature (1)..(1064): Ceres CLONE ID no. 268310
  misc_feature (1)..(1064): Also Known As Ceres ME LINE ME02077
  CDS (47)..(952): Encodes the polypeptide sequence given in  SEQ ID NO: 79
gtcaaatcaaatccttcttcctcttcaattctctgtttcctccaaaatggctacaccaaacgaagtatcagctcttttcctcatcaagaagtatctcctcgacgaattgtctccgttgcctactactgccaccaccaatcgatggatgaacgatttcacgtcatttcatcaaaccggtttcgagttttctgaatttgaaaccaaaccggaaataatcgatctcgtcactcccaaaccggagatttctgatttcgaggtgaaatctgaaatttcaattgaatcgaacgattccttcacgttccaatcgaatcctcctcgtgtcactgttcaatccaatcgaaaaccgccgttgaagatcgcaccaccgaaccgaaccaagtggattcaattcgcaaccggaaatcctaaaccggaacttcccgaaccggttgtagcagcagaagagaagaggcattacagaggagtgaggatgaggccgtggggaaaattcgcggcggagatccgagatccgactcgtcgtggaactcgggtttggcttgggacgtttgagacggcgatcgaagcggctagagcttacgacaaagaagcgtttagactacgaggatcaaaggcgattctgaatttcccgcttgaagttgacaagtggaatccacgcgctgaagatggtcgtggcctgtacaaacggaagagagacagcgaggaggaggaagtgaaggtggtgaagaaagtgctaaagaaggaggagagttacgccgttagcgacggagagaatgttgagtcaggtttgacggcgatagatgactgggattatcgataccgtcgacctcgagggggggcccggtacccaattcgccctatagccagagctctggtatcgataccgtcgacctcgagggggggcccgctagagtcctgctttaatgagatatgcgagacgcctatgatcgcatgatatttgctttcaattctgttgtgcacgttgtaaaaaacctgagcatgtgtagctcagatccttaccgccggtttcggttcattctaatgaatatatcacccgttactatcgt

SEQ ID NO: 79 - protein, 301 aa, Arabidopsis thaliana
  misc_feature (1)..(301): Ceres CLONE ID no. 268310
  misc_feature (1)..(301): Also Known As Ceres ME LINE ME02077
  misc_feature (135)..(187): Pfam Name: AP2 Pfam Description: AP2 domain
  misc_feature: Score of 727.5 for HMM of FIGURE 3.
MATPNEVSALFLIKKYLLDELSPLPTTATTNRWMNDFTSFHQTGFEFSEFETKPEIIDLVTPKPEISDFEVKSEISIESNDSFTFQSNPPRVTVQSNRKPPLKIAPPNRTKWIQFATGNPKPELPEPVVAAEEKRHYRGVRMRPWGKFAAEIRDPTRRGTRVWLGTFETAIEAARAYDKEAFRLRGSKAILNFPLEVDKWNPRAEDGRGLYKRKRDSEEEEVKVVKKVLKKEESYAVSDGENVESGLTAIDDWDYRYRRPRGGARYPIRPIARALVSIPSTSRGGPLESCFNEICETPMIA

SEQ ID NO: 80 - protein, 290 aa, Brassica oleracea
  misc_feature (1)..(290): Public GI no. 89257562
  misc_feature (1)..(290): Functional Homolog of  Ceres CLONE ID no. 268310 at SEQ ID NO. 79
  misc_feature (149)..(201): Pfam Name: AP2 Pfam Description: AP2 domain
  misc_feature: Score of 695.1 for HMM of FIGURE 3.
MATPSEASALSFIKKHLLDESSPLPKVTTTNPWIASETISNFSIFGSFDQTGFDFSEFETKPEITDLVTHRFTDSFESEPEANAEIQLASSESFTFQSNPRGVSGPASRSNRKPPLKIDPPSRTEWIQFATENPQPEQLPVHVAAEEKRHYRGVRMRPWGKFAAEIRDPNRRGTRVWLGTFDTAIEAARAYDQAAFRLRGSKAIVNFPLEVGTWNQRADVGQNKRKRDGEGEEVTVVAKVLKTEESHAVETETSSLTAVDDWDLTELLSMPLLSPLSPHPPFGYPQLTVV

SEQ ID NO: 81 - DNA, 1165 bp, Panicum virgatum
  misc_feature (1)..(1165): Ceres CLONE ID no. 1725082
  CDS (145)..(969): Encodes the polypeptide sequence given in  SEQ ID NO: 82
ataccagtcagtacaccactcggacggcgcacgcaccgcagctccagcggcagcgccgccgcacgccgtgcccgcaggtctctccttctcaggccttctcctgacctcctctcgagtctcgccgctcgactcggccgcgcgccgatggccctgctgcgggagcacctcgacctcatccgcgcgcacctcctcgacgaccgccacgaccacgacaacgacgccgccgccagctccgaggaccactcggcgtcgtcgccctcgccctcgccgcccgccgggcggaggccactgccggcgctctccgtcgcgctgcccccgcggccagcgctcgccctgcagcagcagcagcagctgtgggcggcgccgccgccgcagatcattcaccagcaggagcagagctactactactgcccggaagccgaggaggatgacttccggcggtaccgcggcgtgcggcagcggccgtggggcaagtacgcggcggagatccgggacccggcgcggaagggcgcgcgcgtgtggctgggcacctacgacaccgccgtggaggccgcgcgcgcctacgaccgcgccgcgttccgcctgcgcggctccaaggccatcctcaacttccccaacgaggtcgccttcggcaccgccgcgcggtgggggccgccgcctcctcctgctgccgccccccgctatcccgccgccgccggtaataacaagagggcgaggtcgccggagcgggggccgcaagaacagggcgccgggtgcatggtcatcagggaggtgaagcgggagcgggtgcaggagcccgccgggagttgcggttgggacggcgtggccacggcgccgacggcggcgagcggaggcgcggacttctgggaggaggaggagctgctcaagggggcgatctgcagcctgccgccgctctcgccgctgtcaccgcccccgcagctggccttcccgcagctctccgtcagctgacgtgtcgaagcatgcggctgatccatccatctgtggataggcatggagaagggcgcgtggactcctaattaactgatgagttattagtgttaatccactttgaggagttctaccatgagtacaactccaccaaatattctttcgttcgttgtctattcaagtatcttagtccaaacgacaagtaaatgttcttcgc

SEQ ID NO: 82 - protein, 274 aa, Panicum virgatum
  misc_feature (1)..(274): Ceres CLONE ID no. 1725082
  misc_feature (1)..(274): Functional Homolog of  Ceres CLONE ID no. 268310 at SEQ ID NO. 79
  misc_feature (98)..(150): Pfam Name: AP2 Pfam Description: AP2 domain
  misc_feature: Score of 135.6 for HMM of FIGURE 3.
MALLREHLDLIRAHLLDDRHDHDNDAAASSEDHSASSPSPSPPAGRRPLPALSVALPPRPALALQQQQQLWAAPPPQIIHQQEQSYYYCPEAEEDDFRRYRGVRQRPWGKYAAEIRDPARKGARVWLGTYDTAVEAARAYDRAAFRLRGSKAILNFPNEVAFGTAARWGPPPPPAAAPRYPAAAGNNKRARSPERGPQEQGAGCMVIREVKRERVQEPAGSCGWDGVATAPTAASGGADFWEEEELLKGAICSLPPLSPLSPPPQLAFPQLSVS

SEQ ID NO: 83 - protein, 307 aa, Medicago truncatula
  misc_feature (1)..(307): Public GI no. 92878368
  misc_feature (1)..(307): Functional Homolog of  Ceres CLONE ID no. 268310 at SEQ ID NO. 79
  misc_feature (155)..(207): Pfam Name: AP2 Pfam Description: AP2 domain
  misc_feature: Score of 746.0 for HMM of FIGURE 3.
MANFEEASALKRIKMHLLGEFSPLPSPISTPCFDFDFDFEFQTIPNISQSESNSSTSDSSISLDHYLTNLLETDTQIPLFEFDTKPQLMEHESPKALTSSHHVNQPQRTVEKKPKLSRKPSLEIALPKKTEWIQFGKPDPKPEVVVQKPEVAEKQHYRGVRQRPWGKFAAEIRDPNKRGSRVWLGTFETAIEAAKAYDSAAFRLRGSKAILNFPLEVNAVAASAETTVEGNKKRCREEEEEEEEEVVEVKPVVKKEKITEYDMNCFKEMPLTPSFWTGLWDGDVKGLVSVPPLSPLPSFCLSPLVVV

SEQ ID NO: 84 - protein, 276 aa, Glycine max
  misc_feature (1)..(276): Ceres CLONE ID no. 1661141
  misc_feature (1)..(276): Functional Homolog of  Ceres CLONE ID no. 268310 at SEQ ID NO. 79
  misc_feature (137)..(189): Pfam Name: AP2 Pfam Description: AP2 domain
  misc_feature: Score of 666.5 for HMM of FIGURE 3.
MANALEVSALNRIKLHLLGELSPLTQFQEPNTTSLCSQSSTSDSFTTVDQIFSEFLDFPTTTTSSTEQNQFSAFEFEPKPGIIEPQLEFSFPTTRCKSSRRPSLQISLPKKTEWIQFGEPEVTETVSQSNPNAEEKKHYRGVRQRPWGKFAAEIRDPNKRGSRVWLGTFDTAIEAAKAYDRAAFRLRGSKAILNFPLEAGADDRKRQREEKVEPVLEVVKREKIGESDVSLIKNNPLTPSSWLGFWGSDANGIFTVPPLSPLSPHPALGFPQLMVV

SEQ ID NO: 85 - protein, 307 aa, Medicago truncatula
  misc_feature (1)..(307): Public GI no. 92878365
  misc_feature (1)..(307): Functional Homolog of  Ceres CLONE ID no. 268310 at SEQ ID NO. 79
  misc_feature (152)..(204): Pfam Name: AP2 Pfam Description: AP2 domain
  misc_feature: Score of 629.4 for HMM of FIGURE 3.
MANFEEVSALKRIKFHLLGEFSPLPSPISTPCFDFDFDFEFQTNQTASQSESNSSTSISMNQYFTNLLETDAQIPLFEFDTKPQMMEHESPKALTSSHPFSQSQRTTEKKPKLARKPSLEIALPKKTEWIQFSKPDPKPEAVVQKPEAVKKQHYRGVRQRPWGKFAAEIRDPNKRGSRVWLGTFETAIEAAKAYDSAAFRMRGSKAILNFPLEVNAAAATETAVTAVETTGDGNKKRCREEEEEEVVEVKPVVKKEKITEYDMSCFKEMPLTPSFWTGLWDGDVKGMSSVSPLSPLSSFCLSPLVVV

SEQ ID NO: 86 - DNA, 1167 bp, Gossypium hirsutum
  misc_feature (1)..(1167): Ceres CLONE ID no. 1894778
  CDS (96)..(1079): Encodes the polypeptide sequence given in  SEQ ID NO: 87
aaccgaaaatttcagtatctttcagaaatctcttagcttcttttcctttttctttttcatctctgaaacttttttaggtttttcagttattggatatggaaagtagcagtgaagtgtcgagtgcgcttcaatatatcgaacaatatttacttgatgaaaatcaatttactcctgcgggattggggagcttttcaactgcaaatcaatggataaatgaaccgatacccgaggtttccacctctccgtctcagtctctttgctctcaaacttccacctctgattcctgtcttacgctatccaattttaattgcctcgacgtcgatgatttcttcaacttctctcccaatttcccaggtttcgagtctaaccgaatggatgtttttgaatttgactcgaaacctcaatttatccatctaaccgctcctaagccctttgaatttgcacctcaaatcactgaactttcagctgttaaacctccagctccttcgaattcgagttccagctctcataatcgaaaaccgtcgctcaaaatatcgttaccgcataaagtagagtggattcagttccgcaaaccgtattcgactaaggcacagccgacgaattcaaattccgaagacaaaaataagcattacagaggtgtccgacagagaccgtgggggaagtttgcggccgagatccgagatccgaaccgaagaggttcacggatctggttgggaacctttgataccgcaatagaagccgcaaaggcttacgaccgagccgcttttaagctacgtggctcgaaagcgattcttaacttccctctagaagccgggaagcttgacgtaaccgccgtcgacggagagaggaaacggagcagaggcgacggcgcttgggatgagaaacaagttaaggccgttaagagagcaaatgatgacgtgaccaaagcgagagataacggcgatgggcctttaacgccgtcaaattggacatcatttatggattggaataatgaggcaaagggaatatttaacatgccattgttatcgccgttatctccacacccgccgttaggctttcaacaagtgacggtcatctaatgataatgtatataaattcttttatttgtttttagaattctggaattctcttctttcaaaagaaaaaaaataaaaattgggattctat

SEQ ID NO: 87 - protein, 327 aa, Gossypium hirsutum
  misc_feature (1)..(327): Ceres CLONE ID no. 1894778
  misc_feature (1)..(327): Functional Homolog of  Ceres CLONE ID no. 268310 at SEQ ID NO. 79
  misc_feature (177)..(229): Pfam Name: AP2 Pfam Description: AP2 domain
  misc_feature: Score of 377.1 for HMM of FIGURE 3.
MESSSEVSSALQYIEQYLLDENQFTPAGLGSFSTANQWINEPIPEVSTSPSQSLCSQTSTSDSCLTLSNFNCLDVDDFFNFSPNFPGFESNRMDVFEFDSKPQFIHLTAPKPFEFAPQITELSAVKPPAPSNSSSSSHNRKPSLKISLPHKVEWIQFRKPYSTKAQPTNSNSEDKNKHYRGVRQRPWGKFAAEIRDPNRRGSRIWLGTFDTAIEAAKAYDRAAFKLRGSKAILNFPLEAGKLDVTAVDGERKRSRGDGAWDEKQVKAVKRANDDVTKARDNGDGPLTPSNWTSFMDWNNEAKGIFNMPLLSPLSPHPPLGFQQVTVI

SEQ ID NO: 88 - protein, 318 aa, Oryza sativa subsp. japonica
  misc_feature (1)..(318): Public GI no. 50927523
  misc_feature (1)..(318): Functional Homolog of  Ceres CLONE ID no. 268310 at SEQ ID NO. 79
  misc_feature (138)..(190): Pfam Name: AP2 Pfam Description: AP2 domain
  misc_feature: Score of 134.6 for HMM of FIGURE 3.
MDFPGDAEDFALEFIREHLLGGDAPVLPPAAVPAAAAYLPTSTMFLPQQQRGYAGLTPQEYVVDSAPAADQAAFRDDQPDPAADVMIMFGGERFPAVKPSSSSSPSLTVTVPPSSFGSWAPAAVPAVAATAAAVEDFRKYRGVRQRPWGKFAAEIRDPKRRGSRVWLGTYDTPVEAARAYDRAAFRMRGAKAILNFPNEVGTRGAELWATPPPTNKRKRQPEDDTAAADDVEVIGVANKAVKTEAPTSAYSSSSLSSMSRDTTATTSSAGTSTGSSEPTSFPVVTPSSWSWDQYWDGLPPLSPLSPHPALGFPQLTVS

SEQ ID NO: 89 - protein, 282 aa, Nicotiana sylvestris
  misc_feature (1)..(282): Public GI no. 8809575
  misc_feature (1)..(282): Functional Homolog of  Ceres CLONE ID no. 268310 at SEQ ID NO. 79
  misc_feature (136)..(188): Pfam Name: AP2 Pfam Description: AP2 domain
  misc_feature: Score of 664.3 for HMM of FIGURE 3.
MASPQENSTTLDLIRQHLLDDNVFLEHYCSETETTTLIYSQSSSSSESLDQSFSFEPTLNYATTAQSSNLEVSTFFNNSKTEFDSFEFGTIPNVSAARSSSLKQTSFKERKPSLNIAIPVKQEVVQKVELAPTEKKHYRGVRQRPWGKFAAEIRDPNRKGTRVWLGTFDTAIEAAKAYDRAAYKLRGSKAIVNFPLEVANFKQEFNNEIRPLVNSSRKRVRETVNEEQLVINKEMKIEEERVPTAPLTPSSWSAIWDSGDGKGIFEVPPLSPFGAYSQLVMI

SEQ ID NO: 90 - protein, 291 aa, Nicotiana tabacum
  misc_feature (1)..(291): Public GI no. 1208497
  misc_feature (1)..(291): Functional Homolog of  Ceres CLONE ID no. 268310 at SEQ ID NO. 79
  misc_feature (143)..(195): Pfam Name: AP2 Pfam Description: AP2 domain
  misc_feature: Score of 584.2 for HMM of FIGURE 3.
MASPQENCTTLDLIRQHLLDDNVFMEHYCPQPILYSQSSSSSESLNSIASELNNETFSFEPTLKYADTAQSSNLDISSFFNNSKTEFDSFEFETKPNVSAARISSNSPKQTSFKERKPSLNIAIPMKQQEVVQKVEVVPTEKKHYRGVRQRPWGKFAAEIRDPNRKGTRVWLGTFDTAIEAAKAYDRAAFKLRGSKAIVNFPLEVANFKQQDNEILQPANSGRKRMRETENEEIVIKKEVKREERVPAAAAPLTPSSWSAIWEGEDGKGIFEVPPLSPLSPHMAYSQLVMI

SEQ ID NO: 91 - protein, 272 aa, Capsicum annuum
  misc_feature (1)..(272): Public GI no. 60459383
  misc_feature (1)..(272): Functional Homolog of  Ceres CLONE ID no. 268310 at SEQ ID NO. 79
  misc_feature (122)..(174): Pfam Name: AP2 Pfam Description: AP2 domain
  misc_feature: Score of 648.8 for HMM of FIGURE 3.
MGSPQENCSFDMIRQHLDDISLMEYYCPENTLYSQSCESLDQTSVSFETSSNLDDISSFFSSSKTDFGCFEFETKPITSAATSISSNSPKKRSFNERKPSLNIAVPVKPVVVQKVEVVREKKHYRGVRQRPWGKFAAEIRDPNRKGTRVWLGTFDTAVDAAKAYDRAAFKLRGSKAILNFPLEVANFKQQNSTVEVPQQVNSSGSKRAREKEELAINKEMKIEEEERVAQTAPLTPSNWSTIWDSGNGKGIFEVPPLSPLSPHMSYSQLVMI

SEQ ID NO: 92 - DNA, 1803 bp, Arabidopsis thaliana
  misc_feature (1)..(1803): Ceres LOCUS ID no. At4g35180
  misc_feature (1)..(1803): Ceres ANNOT. ID 508342
  misc_feature (1)..(1803): Also Known As Ceres ME LINE ME06123
  misc_feature (1)..(1803): Genomic Sequence of SEQ ID NO:93
  misc_feature (1)..(203): exon
  misc_feature (204)..(308): Intron
  misc_feature (309)..(442): exon
  misc_feature (443)..(575): Intron
  misc_feature (576)..(991): exon
  misc_feature (992)..(1096): Intron
  misc_feature (1097)..(1228): exon
  misc_feature (1229)..(1317): Intron
  misc_feature (1318)..(1803): exon
atgtcaccagccccctccacggatccacaaccaatctccggcgaaaaaaacggcggcgatggtggtaggattccggtagaagagtggctgccgatcacagaatcaagaaaaggaaatgtttatacggcgacgtttcatcttctctgttcgggaattggtctccaagtgattcttcttcctgcagctttcgcagcactcggatggtaataactctattcataattctctttagtttctttattttgtccgatttgtgaaatctctgctttgagtaccgttttgattattttatttatttatttttctagggtatggggaacgataatcttaacggtagggtttgtatggaagctctacacgacgtggcttcttgttcaactccacgaagcggttccgggaattcgtatcagcagatacgtgagactcgcaattgcttcttttggtatgtaactatttaacaaaaatcctaattctctcttgatttgtcgttttttgagttttggaatttattaagaacttcagtttcgttaaacgataccgtttctgatgttgttgtaatgaaacaatataattaggtgtgaagcttgggaaacttctcggaatattccctgtgatgtatctctcaggaggagcttgtacgattctggttataaccggagggaaatcaatacaacaactgttacaaattatgtctgacgacaatacagcgccacttacttcagtgcaatgcttcttggtttttagttgcattgcgatgatcatgtctcagtttccgaatctaaattctctctttggagtctcgttgatcggtgcttttatgggaattgcgtattgcaccgtgatatggattttacctgtagctagtgactcacaaaggactcaagtcagtgtctcgtacgctacaatggataaaagtttcgttcacattttcaacgctattggattgatagctctagtatatcgcgggaacaatctcgtccttgagatacaggttttgactaactcgcagttaaaacatgatttagacgttttcaaaatatattttcttctttcgtttagtattaataatgtggtttctttggggtgatatttgtagggtactcttccttccgattcaaagaacccttcatgtaagacaatgtggagagcagtgatgatctctcatgctctcgtcgcgatttgtatgtttccattaacgtttgttgtatattgggcatacggagacaaggtatatgtcaaaaccaaacactattccattttttgtaggtgtatatgtttgcatttacattttgaatagaatttttttttttttgatagattccggcgacgggaggtcccgtgggcaactatctgaaactttacacacaagagcactcgaagcgagcagcctgtttcatacacctcacgtttatcttctcttgcttatgttcatatccgataaacttaatgccggcgtgtgacaacatagagatggtgtacataaccaagaagaaaaagcctgcatccatcattgtccggatgatgttgcgtgtgtttttgagcttggtttgtttcactatagccgttggattcccgttcttgccttatctagcggttcttattggagcaatagccttgcttgtgacgtttacgtatccatgtttcatgtggatctctatcaaaaagccccaaaggaaaagcccaatgtggttgtttaacgttttggtgggttgcctaggtgcttctctcagcgttttgcttctggttgcctcggctatgcgtttggctcaaaagggtttgcatgctaacttcttcagaccctaa

SEQ ID NO: 93 - DNA, 1596 bp, Arabidopsis thaliana
  misc_feature (1)..(1596): Ceres LOCUS ID no. At4g35180
  misc_feature (1)..(1596): Also Known As Ceres ME LINE ME06123
  misc_feature (1)..(1596): Encodes the polypeptide sequence given in  SEQ ID NO: 94
  CDS (48)..(1418)
acttatttgatttggaatcacaagaaagtggtggttctcctttatttatgtcaccagccccctccacggatccacaaccaatctccggcgaaaaaaacggcggcgatggtggtaggattccggtagaagagtggctgccgatcacagaatcaagaaaaggaaatgtttatacggcgacgtttcatcttctctgttcgggaattggtctccaagtgattcttcttcctgcagctttcgcagcactcggatgggtatggggaacgataatcttaacggtagggtttgtatggaagctctacacgacgtggcttcttgttcaactccacgaagcggttccgggaattcgtatcagcagatacgtgagactcgcaattgcttcttttggtgtgaagcttgggaaacttctcggaatattccctgtgatgtatctctcaggaggagcttgtacgattctggttataaccggagggaaatcaatacaacaactgttacaaattatgtctgacgacaatacagcgccacttacttcagtgcaatgcttcttggtttttagttgcattgcgatgatcatgtctcagtttccgaatctaaattctctctttggagtctcgttgatcggtgcttttatgggaattgcgtattgcaccgtgatatggattttacctgtagctagtgactcacaaaggactcaagtcagtgtctcgtacgctacaatggataaaagtttcgttcacattttcaacgctattggattgatagctctagtatatcgcgggaacaatctcgtccttgagatacagggtactcttccttccgattcaaagaacccttcatgtaagacaatgtggagagcagtgatgatctctcatgctctcgtcgcgatttgtatgtttccattaacgtttgctgtatattgggcatacggagacaagattccggcgacgggaggtcccgtgggcaactatctgaaactttacacacaagagcactcgaagcgagcagcctgtttcatacacctcacgtttatcttctcttgcttatgttcatatccgataaacttaatgccggcgtgtgacaacatagagatggtgtacataaccaagaagaaaaagcctgcatccatcattgtccggatgatgttgcgtgtgtttttgagcttggtttgtttcactatagccgttggattcccgttcttgccttatctagcggttcttattggagcaatagccttgcttgtgacgtttacgtatccatgtttcatgtggatctctatcaaaaagccccaaaggaaaagcccaatgtggttgtttaacgttttggtgggttgcctaggtgcttctctcagcgttttgcttctggttgcctcggctatgcgtttggctcaaaagggtttgcatgctaacttcttcagaccctaaagcatccttgcaatcgttagaatgtaattagaatttgtggcacacgtggtaaacttgggactactaacatgttcagttgaaatatttaaattttgtaattatgatattttaatgtatacttctctcaaaaaagagaaaatcgtcagttgatgacaacactattcaacttgttaattcc

SEQ ID NO: 94 - protein, 456 aa, Arabidopsis thaliana
  misc_feature (1)..(456): Ceres LOCUS ID no. At4g35180
  misc_feature (1)..(456): Also Known As Ceres ME LINE ME06123
  misc_feature (36)..(442): Pfam Name: Aa_trans Pfam Description: Transmembrane amino acid transporter protein
  misc_feature: Score of 1135.5 for HMM of FIGURE 5.
MSPAPSTDPQPISGEKNGGDGGRIPVEEWLPITESRKGNVYTATFHLLCSGIGLQVILLPAAFAALGWVWGTIILTVGFVWKLYTTWLLVQLHEAVPGIRISRYVRLAIASFGVKLGKLLGIFPVMYLSGGACTILVITGGKSIQQLLQIMSDDNTAPLTSVQCFLVFSCIAMIMSQFPNLNSLFGVSLIGAFMGIAYCTVIWILPVASDSQRTQVSVSYATMDKSFVHIFNAIGLIALVYRGNNLVLEIQGTLPSDSKNPSCKTMWRAVMISHALVAICMFPLTFAVYWAYGDKIPATGGPVGNYLKLYTQEHSKRAACFIHLTFIFSCLCSYPINLMPACDNIEMVYITKKKKPASIIVRMMLRVFLSLVCFTIAVGFPFLPYLAVLIGAIALLVTFTYPCFMWISIKKPQRKSPMWLFNVLVGCLGASLSVLLLVASAMRLAQKGLHANFFRP

SEQ ID NO: 95 - DNA, 1509 bp, Populus balsamifera subsp. trichocarpa
  misc_feature (1)..(1509): Ceres ANNOT ID no. 1450631
  CDS (1)..(1509): Encodes the polypeptide sequence given in  SEQ ID NO: 96
atgggagaaattggcaatgttgaacaattacctttccacaacctacccagttcagccaccggccctgaattatctcttcatgtcatcagtgttgcagcaagttccatgcgagaaatgcagagtgctgctacgagtacaagcatgggggtttatgattcctcagatagttcaggctacctgtctgaggtcaacccacaagaagcttggcttcctattacagaatcaagaaatggcaatactgttacttccgtgtttcatttactttcttcaggaattgggattcaagcccttctacttcctgtggcattttccattcttggatgggcatggggaatcatatgcttgtcgctagcatttacctggcaactctataccatatgggttcttgtccaacttcatgaatcagtacctggaattggaactcgctacagcagatatctccaacttgcaatagccgcctttggtccaaaacttgggaagttgctggctatatttccagtaatgtatttatccgggggctcatgtgtgttgctgattatcagaggagctggaactatggagcttttcttcaaaatgatgtttcgaggtgaggctacaattgaagacagtccattggcaggggcagggtggtttttggtcttcacttgcatggctatagcattggctcaacggcctaacttgaattccattgctgggttctcccttatcggtgcagtcactgccattgcctattgtactctgatctgggcactgcccatctctaagggcaggcctagtggtgtatcttataattcacagaaggaggaatccggcatgtctgaaatgtttgatgtcttgaatgcaattgggatgattgtgcttgctttcaggggtcacaatcttggcaccctgccttcaagttcaaaatgtccatccaaaaagctaatgtggagaggagtgactctctcatacataataatagccatttgcttgtttcctattgcaattgctggattttggacttatggaaacaagataccctcgaatggagggatgttgactgcatttatgcagttgcatggacacgacacatcaaaatttgcgaagggccttgtatacttgctagtagtgattaactgccttagttcattccaaatctacgccatgccagttttcgacaacctggaattcaggtacacttgcatgaagaacaagcgatgctcgtggtgggttcgcaccgggtttcggctttttttcggaggattggccttctttatagctgtggcttttccatttttacctagcctggctgctttaatcggaggaatcgcgttaccccttacactggcttatccatgtttcatgtggatttcgatcaagaaaccccatcaaaagggccatggtgtcatgtggtgtcttaatctaggacttggatgcttaggcatggttctgagtgttctattggtcgttgcagcagtttggaatttggctaccaaaggcctacatgccaacttcttccaccccgaatga

SEQ ID NO: 96 - protein, 502 aa, Populus balsamifera subsp. trichocarpa
  misc_feature (1)..(502): Ceres ANNOT ID no. 1450631
  misc_feature (1)..(502): Functional Homolog of  Ceres LOCUS ID no. At4g35180 at SEQ ID NO. 94
  misc_feature (76)..(487): Pfam Name: Aa_trans Pfam Description: Transmembrane amino acid transporter protein
  misc_feature: Score of 1211.5 for HMM of FIGURE 5.
MGEIGNVEQLPFHNLPSSATGPELSLHVISVAASSMREMQSAATSTSMGVYDSSDSSGYLSEVNPQEAWLPITESRNGNTVTSVFHLLSSGIGIQALLLPVAFSILGWAWGIICLSLAFTWQLYTIWVLVQLHESVPGIGTRYSRYLQLAIAAFGPKLGKLLAIFPVMYLSGGSCVLLIIRGAGTMELFFKMMFRGEATIEDSPLAGAGWFLVFTCMAIALAQRPNLNSIAGFSLIGAVTAIAYCTLIWALPISKGRPSGVSYNSQKEESGMSEMFDVLNAIGMIVLAFRGHNLGTLPSSSKCPSKKLMWRGVTLSYIIIAICLFPIAIAGFWTYGNKIPSNGGMLTAFMQLHGHDTSKFAKGLVYLLVVINCLSSFQIYAMPVFDNLEFRYTCMKNKRCSWWVRTGFRLFFGGLAFFIAVAFPFLPSLAALIGGIALPLTLAYPCFMWISIKKPHQKGHGVMWCLNLGLGCLGMVLSVLLVVAAVWNLATKGLHANFFHPE

SEQ ID NO: 97 - protein, 543 aa, Glycine max
  misc_feature (1)..(543): Ceres CLONE ID no. 1658212
  misc_feature (1)..(543): Functional Homolog of  Ceres LOCUS ID no. At4g35180 at SEQ ID NO. 94
  misc_feature (117)..(528): Pfam Name: Aa_trans Pfam Description: Transmembrane amino acid transporter protein
  misc_feature: Score of 1379.4 for HMM of FIGURE 5.
MGEAKEIWSAPITPRTASVVGTPVVASPPVSCPPSQLHSPSLTRSPLLHPEDGDAPRPNKTSKTPKTPRTPRTPRTPLRISNLTPKFLTPLGSPVRKALRFTKLDPQDAWLPITESRNGNKYYAAFHTLCSGIGIQALVLPVAFTFLGWTWGIISMTLAFIWQLYTLWLLVNLHESVEQGVRYCRYLQLCGATFGEKLGKILALFPILYLSAGTCTTLIIIGGSTARTFYQVVCGETCTAKPMTTVEWYLVFTCVAVVLSQLPNLNSIAGVSLIGAVTAVGYCTAIWVTSVARGALKDVSYNPVRTGSSIENAFGVLNALGIIAFAFRGHNLILEIQSTMPSSEKHPSHVPMWKGVKVSYTIIAACLFPMAIGGYWAYGQLIPANGGMLTALYQYHSRDVSRFVLGLTSFFVVVNGLCSFQIYGMPAFDDMESGYTARMKKPCPWWLRAFIRVFFGFLCFFIGVAVPFLSQLAGLIGGVALPVTFAYPCFMWLKTKKPKKLSLMWWLNWFLGTLGVALSAILVAASLYVIVDTGVNVSFFNPQ

SEQ ID NO: 98 - protein, 512 aa, Oryza sativa subsp. japonica
  misc_feature (1)..(512): Public GI no. 50927941
  misc_feature (1)..(512): Functional Homolog of  Ceres LOCUS ID no. At4g35180 at SEQ ID NO. 94
  misc_feature (84)..(489): Pfam Name: Aa_trans Pfam Description: Transmembrane amino acid transporter protein
  misc_feature: Score of 1401.5 for HMM of FIGURE 5.
MSSEVTSVPPTPTPPPVSTPPSQIQSPAAPASSRASPLRGMGTPNIASPVRKAVASVSGYLGEVGQMTRLADPRDAWLPITESRSGNAYYAAFHSLSSGIGFQALVLPVAFSLLGWTWAIICLTVAFAWQLYTLWLLVKLHEPVAGGTRYSRYMYLATTVFGEKWGKILALLPVMYLSAGTCTALIIVGGGSMKLLFNIACGEVCLARPLTTVEWYLVFVCVAALLSQLPNLNSIAGVSLVGATAAVAYCTMIWVVSVAKGRVAGVSYDPVRTTDEEDGAIGILNGLGIIAFAFRGHNLVLEIQATMPSTLKHPSHVPMWKGVKAAYVIIALCLYPVAVGGFWAYGDQIPPNGILSALYKFHSQDVSRVVLGTATLLVIVNCLTTYQIYAMPVFDNMETGYVHKKNRPCPWWMRAGFRALFGAINLLIAVALPFLSELAGLLGGISLPVTLAYPCFMWVAIMRPAKGTAMWYTNWGLGSLGMGLSFVLIVGNLWGLVEKGLHVKFFKPADFQ

SEQ ID NO: 99 - protein, 484 aa, Zea mays
  misc_feature (1)..(484): Ceres CLONE ID no. 383013
  misc_feature (1)..(484): Functional Homolog of  Ceres LOCUS ID no. At4g35180 at SEQ ID NO. 94
  misc_feature (86)..(411): Pfam Name: Aa_trans Pfam Description: Transmembrane amino acid transporter protein
  misc_feature: Score of 1121.0 for HMM of FIGURE 5.
MSSSREVMVLSDSEVQSAPPTPRPPPPVSAPPSQIHSPSPARSPLASPVRKAVAGVKAGCLEEEVGGHVTRLADPRDAWLPVTESRSGNAYYAAFHSLSSGIGFQALVLPTAFASLGWTWAIICLTLAFGWQLYTLWLLVRLHEPVAGATRYSRYMHLATTVFGDRWANILALLPVTYLSAGICTALIIVGGGSMKMLFGIAYGGSCLARPLTAVEWYLVFVCAAVVLSQLPNLNSIAGVSLVAAVAAVAYCTMIWAVSVARGRVAGVSYDPVHKAPDDVDAALGVLNGLGIIAFAFRGHNVVLEIQGTMPSTLKHPSHVPMWKGVKVAYAIIALCLYPIAIGGFWAYGNQIPPNGILSALYKFHSRDASRLVLGVTTLLVIINCLTTFQIYAMPVYDNMEAGYVHKKNRPCPCGCARASAPSSARSTSSSPSRCRSCRSSPASSEGSRCRSPWPTRASCGWRSRSRGRAPPRGTSTGRWESLA

SEQ ID NO: 100 - protein, 505 aa, Triticum aestivum
  misc_feature (1)..(505): Ceres CLONE ID no. 788118
  misc_feature (1)..(505): Functional Homolog of  Ceres LOCUS ID no. At4g35180 at SEQ ID NO. 94
  misc_feature (77)..(487): Pfam Name: Aa_trans Pfam Description: Transmembrane amino acid transporter protein
  misc_feature: Score of 1399.0 for HMM of FIGURE 5.
MTSEVQSAPPTPRPVSAPPSQMHSPAPSRSPLRAMASPLASPVKKAVASVRGYLEEVGHITKLADPRDAWLPITASRSGNAYYAAFHNLSSGVGFQALVLPAAFASLGWTWAIVCLTVAFAWQLYTLRLLVNLHEPVAGGTRYSRYMHLATTVFGERWGKILALLPTMYLSAGTCTALIIVGGGSMKILFSIACGPACVARPPTMVEWYVVFVCVAVVLSQLPNLNSIAGVSLVGATAAVGYCTMIWVISVTKGRVAGVSYDPVKASSDVDRTIAVLNGLGIIAFAFRGHNLVLEIQGTMPSTLKHPSHVPMWKGVKFAYLVVALCLYPVAIGGFWAYGNQIPPNGILSALYKFHSRDVSRLVIGLATLLVIVNCLTTFQIYAMPVFDNMEAGYVHKKNRPCPWWLRAGFRALFGAVNLLIAVALPFLSELAGLLGGISLPVTLAYPCFMWLAIMKPGRGTAMWCVNWALGCLGMGLSFVLIVGNLWGLVATGLHVQFFKPAEFQ

SEQ ID NO: 101 - DNA, 2018 bp, Arabidopsis thaliana
  misc_feature (1)..(2018): Ceres LOCUS ID no. At5g14260
  misc_feature (1)..(2018): Also Known As Ceres ME LINE ME00922
  misc_feature (1)..(2018): Ceres Clone 41610
  CDS (172)..(1719): Encodes the polypeptide sequence given in  SEQ ID NO: 102
tcttccgataaaaaccggatcccccgggctgcaggaattcgcacgagaccattacctagaacatcctaatcgaaaaaaaacgcaaaagaagaacggagcaaaatcttcagaatcgtcgccggagaatctttacgtttcgacataatcggaattttggaattgataattccgatggaaggggttatcacatgtttccatacgaaatgcgtctctcttccaattcgttctttcccactttctagggtttcttcacttcctcggtggaggaacaataaattgatctcttcatcgcgatcggttcatctaagaagcttgtgcgtttcggcttcgagctcagatactttagtcgcgggcggttcaccaaaggaagacgagaggcagagcaaagtatcgagcaagaaggaaggagatgactccgaggatttgaagttttggatggataagaatgggttgccaccttgcaaggttattctcaaggagaaaccagctcatgatcagaagcataaacctatacattatgttgctgctagtgaggatcttcagaagggtgatgtggcgttttcagttcctgattctctggtggtcactctggaaagagttttgggaaacgagactattgctgaactgttgacgacgaacaaattatccgaactggcttgtctagctttgtatttgatgtatgagaagaaacaaggaaagaaatcagtatggtatccctatataagagaacttgatcgtcaaagaggaagaggtcagttagatgcggaatcccctttgctgtggtcagaggctgagttagattacctaactggtagtcctaccaaggccgaagttcttgagagggctgaagggatcaaaagagaatacaatgagcttgacactgtctggttcatggctggatctttgtttcagcaatacccatttgacataccaactgaagctttttcatttgagattttcaaacaggcatttgttgccattcagtcatgtgtggtgcatttacaaaatgtcggtttggctcgtcggtttgctttggttcctcttggtcctcccttgttggcctattgttccaactgcaaggcaatgcttactgctgttgatggtgctgttgaactcgtggtagataggccatataaggccggggatcctatagttgtctggtgtgggccacaaccaaatgcgaaattgcttctgaactatggatttgttgatgaggataacccttatgatagagtaatagttgaggcagcgttcaacactgaggatccccaataccaggacaagagaatggttgctcaaaggaacggaaaattatcccaacaagtatttcaggttcgtgtgggaaaagaaagagaagctgttcaagacatgcttccctacctgcggttgggttacatgtctgatccttctgaaatgcagtcagtaatttcatcccaaggtccagtttgtccgatgagcccttgtatggaaagagcagtactagatcagcttgctaattacttcatgagacggttatctggctaccctactactccgaaagaagatgatgcattgttggcagatcctagtttgagtcctaggaagcgagttgcaacccggcttgtccaactggagaagaaaatactagttgcatgccttacgacaacagttgatcttttaaatcagttgcccgatacagccatctctccatgcccagcaccatatgctccttccttgaaataaaaaggttcgtgttgtagctgcaatttgtgggacatggcaggagtaatttttggtcgtgtccttgatcattacaatctgaggtcgcttaactacggtagataagggtgtactaggagcgttatctgccgcttgacacgcaaatgtttcagcatatgattgtcctttttttcttacaacaatgaagccttaagtcgcattgttcaaagtgtacatacatgaatgaaccttcttgttcttccccaactccctctgtaatgttttatctctgttttagaaatttagaatttatcatttct

SEQ ID NO: 102 - protein, 516 aa, Arabidopsis thaliana
  misc_feature (1)..(516): Ceres LOCUS ID no. At5g14260
  misc_feature (1)..(516): Ceres Clone 41610
  misc_feature (1)..(516): Also Known As Ceres ME LINE ME00922
  misc_feature (361)..(485): Pfam Name: Rubis-subs-bind Pfam Description: Rubisco LSMT substrate-binding
  misc_feature (83)..(338): Pfam Name: SET Pfam Description: SET domain
  misc_feature: Score of 1261.8 for HMM of FIGURE 8.
MEGVITCFHTKCVSLPIRSFPLSRVSSLPRWRNNKLISSSRSVHLRSLCVSASSSDTLVAGGSPKEDERQSKVSSKKEGDDSEDLKFWMDKNGLPPCKVILKEKPAHDQKHKPIHYVAASEDLQKGDVAFSVPDSLVVTLERVLGNETIAELLTTNKLSELACLALYLMYEKKQGKKSVWYPYIRELDRQRGRGQLDAESPLLWSEAELDYLTGSPTKAEVLERAEGIKREYNELDTVWFMAGSLFQQYPFDIPTEAFSFEIFKQAFVAIQSCVVHLQNVGLARRFALVPLGPPLLAYCSNCKAMLTAVDGAVELVVDRPYKAGDPIVVWCGPQPNAKLLLNYGFVDEDNPYDRVIVEAAFNTEDPQYQDKRMVAQRNGKLSQQVFQVRVGKEREAVQDMLPYLRLGYMSDPSEMQSVISSQGPVCPMSPCMERAVLDQLANYFMRRLSGYPTTPKEDDALLADPSLSPRKRVATRLVQLEKKILVACLTTTVDLLNQLPDTAISPCPAPYAPSLK

SEQ ID NO: 103 - DNA, 1509 bp, Populus balsamifera subsp. trichocarpa
  misc_feature (1)..(1509): Ceres ANNOT ID no. 1536088
  misc_feature (1)..(1509): Encodes the polypeptide sequence given in SEQ ID NO 104
atggaattcacttgtttacacaacaaatgcatttcaccttctcttactgttctctctagggtttcaatttcattttccaatcttcctaaacgcgccgtttcatttcaccggcggcggagaaatttgtgctttgcaacattagtcgatgggaaacgtactagtgaagttgtgagcaaaagaggaggagaagaagaagacgaatttggggatttgaagtcttggatgcataaaaatggattgcctccttgcaaagttgtgcttaaagaaagaccttctcatgacaagaaacttcgacctattcattatgttgctgctagcgaggatcttcaggccagtgatgtggcggtttcggtgcccaattcgcttgttgttacactcgagagggttttgggaaatgagactcttgcggaactcttaaccacaaacaaattatcggaattggcatgcttggccttatacctgatgtatgagaagaagcaaggaaagaagtcattctggtatccatatataagggagcttgatcgtcagcgaggtaggggtcagctggctgtggaatctccacttttatggtctgaggctgaattggcttacctgactggtagcccaactaaggctgaagttcttgacagggcagatggaattaaaagagaatatgaggagctagacactgtttggttcatggctggttctctgtttcagcaatatccatatgatatacctactgaagcctttccctttgagatttttaaacaagcttttgtagccattcaatcctgtgtggtgcatttacagaaagtcagtttggctcgaagatttgctttggttcctcttggaccacctttgctagcatacagtagcaactgcaaggcaatgttaactgctgttgatggtgctgttgaattagtggttgatcgaccatacaaggctggggagcccattgttgtatggtgtgggccacagccaaattcaaaattgcttttaaactatggctttgttgatgaagataatccttatgaccgaatagcagttgaggcagcactgaacactgaggaccctcagtatcaggacaagagaatggttgctcaaagaaatgggaaattgtcagtgcaagtttttcaagtatacgctggaaaggaaaaagaagccgtgtcagatattcttccttatttgcgattgggatatgtatcagatccttctgaaatgcaatctgtaatttcttctcaaggtccagtttgtccagtaagcccttgtatggaacaagcagtgttagatcagcttactgtttattttagaacgcgccttgctggctattgtaccagcataagtgaagatgagttgatgttggcagatcctaacttgaaccccaagaagcgagtggctactcagcttgttagattggaaaagaaaatgctgaaggcatgcttgcaggctacagttgatttgataaaccagttacctgatcacaccatgcctccatgcccagctccttatgcccctttattgaaatga

SEQ ID NO: 104 - protein, 502 aa, Populus balsamifera subsp. trichocarpa
  misc_feature (1)..(502): Ceres ANNOT ID no. 1536088
  misc_feature (1)..(502): Functional Homolog of  Ceres LOCUS ID no. At5g14260 at SEQ ID NO. 102
  misc_feature (103)..(324): Pfam Name: SET Pfam Description: SET domain
  misc_feature (347)..(471): Pfam Name: Rubis-subs-bind Pfam Description: Rubisco LSMT substrate-binding
  misc_feature: Score of 1271.2 for HMM of FIGURE 8.
MEFTCLHNKCISPSLTVLSRVSISFSNLPKRAVSFHRRRRNLCFATLVDGKRTSEVVSKRGGEEEDEFGDLKSWMHKNGLPPCKVVLKERPSHDKKLRPIHYVAASEDLQASDVAVSVPNSLVVTLERVLGNETLAELLTTNKLSELACLALYLMYEKKQGKKSFWYPYIRELDRQRGRGQLAVESPLLWSEAELAYLTGSPTKAEVLDRADGIKREYEELDTVWFMAGSLFQQYPYDIPTEAFPFEIFKQAFVAIQSCVVHLQKVSLARRFALVPLGPPLLAYSSNCKAMLTAVDGAVELVVDRPYKAGEPIVVWCGPQPNSKLLLNYGFVDEDNPYDRIAVEAALNTEDPQYQDKRMVAQRNGKLSVQVFQVYAGKEKEAVSDILPYLRLGYVSDPSEMQSVISSQGPVCPVSPCMEQAVLDQLTVYFRTRLAGYCTSISEDELMLADPNLNPKKRVATQLVRLEKKMLKACLQATVDLINQLPDHTMPPCPAPYAPLLK

SEQ ID NO: 105 - protein, 509 aa, Oryza sativa subsp. japonica
  misc_feature (1)..(509): Public GI no. 77554044
  misc_feature (1)..(509): Functional Homolog of  Ceres LOCUS ID no. At5g14260 at SEQ ID NO. 102
  misc_feature (114)..(331): Pfam Name: SET Pfam Description: SET domain
  misc_feature (354)..(478): Pfam Name: Rubis-subs-bind Pfam Description: Rubisco LSMT substrate-binding
  misc_feature: Score of 1284.4 for HMM of FIGURE 8.
MASSASVSPAAASHHRLLLPCSPRRLPRPRPRPSPRLLRSARPRLVACHADTLLPSSSPAAAAAACASTASANGFSDWLREHGLPPGKVAILDRPVPCFREGKDLPLHYVAAGQDLEAGDVAFEVPMSLVVTLERVLGDESVAELLTTNKLSELACLALYLMYEKKQGQDSFWYPYIKELDRQRGRGQLAVESPLLWTESELNYLKGSPIKDEVVARDEGIRREYNELDTLWFMAGSLFQQYPFDIPTEAFPFEIFKQAFVAVQSCVVHLQKVSLARRFALVPLGPPLLTYKSNCKAMLTAVGDSVRLVVDRPYKAGEPIIVWCGPQPNSRLLLNYGFIDEDNPYDRIVIEASLNIEDPQFQEKRMVAQRNGKLAIQNFHVCVGKEKETIAEMLPYLRLGYISDPDEMQSILSSEGDTCPVSPCTERAVLDQLVGYLESRLADYPTTLDEDDAMLADGNLEPKKEVATRLVRLEKKLLHGCLQAANEFINDLPDHTVSPCPAPFAPELK

SEQ ID NO: 106 - DNA, 507 bp, Arabidopsis thaliana
  misc_feature (1)..(507): Ceres LOCUS ID no. At1g26710
  misc_feature (1)..(507): Also Known As Ceres ME LINE ME12485
  misc_feature (1)..(507): Also Known As Ceres Annot. ID 544535
  CDS (1)..(507): Encodes the polypeptide sequence given in  SEQ ID NO: 107
atgacaataccaacatataaccttttatgcataggatcattcattttcttactatgtttcagcattacctttggtcgcaaaaacctactagacaagcccggtggcactctatatgcctccaaacctgttgaagccgccgagcttagagccactttggttactaataccaaagctagagacatttcaagtaatattggtttgggagaggttggaagtcaagagatgcatcacacttacataggaacaggtgaagattcaagtcttggaaataaacaagacaatataaactctgtgcctaggaaggttataagaggtatcgtttccatctcattcgcatttcctatcatcaagattcaggttcctattccgaagccaaatattacggtggctgccataaaccaactcgatgaagaagagatgattaaaggcattgtcataactccaacaaagactaatgagttgtgtatttcccttggaaattacgatgtagagctctcatacagctaa

SEQ ID NO: 107 - protein, 168 aa, Arabidopsis thaliana
  misc_feature (1)..(168): Ceres LOCUS ID no. At1g26710
  misc_feature (1)..(168): Also Known As Ceres ME LINE ME12485
  misc_feature (1)..(168): Also Known As Ceres Annot. ID 544535
MTIPTYNLLCIGSFIFLLCFSITFGRKNLLDKPGGTLYASKPVEAAELRATLVTNTKARDISSNIGLGEVGSQEMHHTYIGTGEDSSLGNKQDNINSVPRKVIRGIVSISFAFPIIKIQVPIPKPNITVAAINQLDEEEMIKGIVITPTKTNELCISLGNYDVELSYS

SEQ ID NO: 108 - DNA, 1860 bp, Glycine max
  misc_feature: Ceres CLONE ID no.479625
  misc_feature: Encodes the peptide sequence at SEQ ID NO 109
aacttgttgcaccgtaactgaaaattgaaaccctctttcgcaaaatttcccaatttcgcgaaaccctaactagccctatggaactctctcgtctcttcgtttccgacacgtgcttcttctcccctccgattcgctgctccccttcgccggcgctgtccacgtttttcgccgtcaagaaccgccggagcaggaggaggagcagcttctgttccgcctccaatcccgacaccttggtcgccggcggtgccgccgtcgtcgctggggccggcgagaagcacgaggaggacttgaagtcttggatgcacaaacacggcctccctccctgcaaggttgtgctgaaggataaaccttgccccaatgattctcataaacctatacattacgtcgcagcaagtcaagatcttcaggttggcgatgttgcattctccgttcctaattccttggtggttacgctggagagggtgctgggaaacgagactgttgctgagctattgactacaaataaattgtccgaattggcgtgcttggcattgtatctgatgtatgagaaaaagcaggggaagaaatctttctggtatccgtacatcagggagcttgatcgccaacgaggtaggggccaactgtctgtggaatcacctcttctatggttaaaatctgagctggattacctgtcaggaagtccaattaaggatgaagttattcaaagggaagaagcaataagaaaagagtataatgaacttgacacagtctggtttatggcaggttctctatttcagcaatatccatatgacattcctactgaggccttttcatttgagattttcaaacaagcctttgctgctattcagtcttgtgtggtgcatttacagaaagttagtttagctcggagatttgctttagttcccctgggacctcctttactgtcctaccaaagcaactgcaaggcaatgctaactgctgttgatggcgctgttgagcttgcagttgatcgcccgtataaagccggggacccaattgttgtgtggtgtggccctcaacctaactcaaagttgcttataaactatggttttgttgatgaaaataattccaatgatcgtcttatagttgaggcagctttaaatactgaagatccacaatatcaagataaaagaatggtggctcaaagaaatggaaagttatcagttcaagtttttcatgtatatgctgggaaggaaagggaagctgtcttagatatgcttcgttatatgcgtttgggctatgtttcagatccttctgagatggaatctgtcatctcctctcaaggtccagtttgtcctgtaagcccttgtatggaacgggctgcgttggatcagttggctgattatttcaaggcacggctggctggctaccctacaacattggctgaagatgaatctatgctgacagatgataatctgaatccaaagaagcgagttgctacccaatatgttaggctggaaaagaaaatgctccatgcctgtttgcaggcaaccaccgacttcattaaccagcttccagaccacactatatctccatgccccgctccctatgcacctttattgaaatgaaaggaactggaaatgtatgtagtctgaactgtacaaatatggatttgatgaaccaggtcagtcaaattatatattcttgatatgcatccaattagaaatcccctgaattaaggtaatttgtggtttatcctcttcagctttggtttatatgtgaatgtaggactttaggattggataaagatactcaattctttaaacttctcactgtgtgaaaaacaccctttgttagcaaaccattaaatgtcagctgagttgtaagacaataatttctttg

SEQ ID NO: 109 - protein, 502 aa, Glycine max
  misc_feature: Ceres CLONE ID no.479625
  misc_feature: Score of 1299.2 for HMM of FIGURE 8.
  misc_feature (1)..(98): Pfam Name: SET Pfam Description: SET domain
  misc_feature (121)..(245): Pfam Name: Rubis-subs-bind Pfam Description: Rubisco LSMT substrate-binding
  misc_feature: Functional Homolog Of Ceres SEEDLINE ID no. ME00922 at SEQ ID NO. 102
MELSRLFVSDTCFFSPPIRCSPSPALSTFFAVKNRRSRRRSSFCSASNPDTLVAGGAAVVAGAGEKHEEDLKSWMHKHGLPPCKVVLKDKPCPNDSHKPIHYVAASQDLQVGDVAFSVPNSLVVTLERVLGNETVAELLTTNKLSELACLALYLMYEKKQGKKSFWYPYIRELDRQRGRGQLSVESPLLWLKSELDYLSGSPIKDEVIQREEAIRKEYNELDTVWFMAGSLFQQYPYDIPTEAFSFEIFKQAFAAIQSCVVHLQKVSLARRFALVPLGPPLLSYQSNCKAMLTAVDGAVELAVDRPYKAGDPIVVWCGPQPNSKLLINYGFVDENNSNDRLIVEAALNTEDPQYQDKRMVAQRNGKLSVQVFHVYAGKEREAVLDMLRYMRLGYVSDPSEMESVISSQGPVCPVSPCMERAALDQLADYFKARLAGYPTTLAEDESMLTDDNLNPKKRVATQYVRLEKKMLHACLQATTDFINQLPDHTISPCPAPYAPLLK

SEQ ID NO: 110 - protein, 514 aa, Arabidopsis thaliana
  misc_feature: Public GI ID no.22326803
  misc_feature: Score of 1258.6 for HMM of FIGURE 8.
  misc_feature (359)..(483): Pfam Name: Rubis-subs-bind Pfam Description: Rubisco LSMT substrate-binding
  misc_feature (81)..(336): Pfam Name: SET Pfam Description: SET domain
  misc_feature: Functional Homolog Of Ceres SEEDLINE ID no. ME00922 at SEQ ID NO. 102
MEGVITCFHTKCVSLPIRSFPLSRVSSLPRWRNNKLISSSRSVHLRSLCVSSSDTLVASGSPKEDERQSKVSSKKEGDDSEDLKFWMDKNGLPPCKVILKERPAHDQKHKPIHYVAASEDLQKGDVAFSVPDSLVVTLERVLGNETIAELLTTNKLSELACLALYLMYEKKQGKKSVWYPYIRELDRQRGRGQLDAESPLLWSEAELDYLTGSPTKAEVLERAEGIKREYNELDTVWFMAGSLFQQYPFDIPTEAFSFEIFKQAFVAIQSCVVHLQNVGLARRFALVPLGPPLLAYCSNCKAMLTAVDGAVELVVDRPYKAGDPIVVWCGPQPNAKLLLNYGFVDEDNPYDRVIVEAALNTEDPQYQDKRMVAQRNGKLSQQVFQVRVGKEREAVQDMLPYLRLGYMSDPSEMQSVISSQGPVCPMSPCMERAVLDQLANYFMRRLSGYPTTPKEDDALLADPSLSPRKRVATRLVQLEKKILVACLTTTVDLLNQLPDTAISPCPAPYAPSLK

SEQ ID NO: 111 - protein, 514 aa, Arabidopsis thaliana
  misc_feature: Public GI ID no.18377718
  misc_feature: Score of 1254.4 for HMM of FIGURE 8.
  misc_feature (359)..(483): Pfam Name: Rubis-subs-bind Pfam Description: Rubisco LSMT substrate-binding
  misc_feature (81)..(336): Pfam Name: SET Pfam Description: SET domain
  misc_feature: Functional Homolog Of Ceres SEEDLINE ID no. ME00922 at SEQ ID NO. 102
MEGVITCFHTKCVSLPIRSFPLSRVSSLPRWRNNKLISSSRSVHLRSLCVSSSDTLVASGSPKEDERQSKVSSKKEGDDSEDLKFWMDKNGLPPCKVILKERPAHDQKHKPIHYVAASEDLQKGDVAFSVPDSLVVTLERVLGNETIAELLTTNKLSELACLALYLMYEKKQGKKSVWYPYIRELDRQRGRGQLDAESPLLWSEAELDYLTGSPTKAEVLERAEGIKREYNELDTVWFMAGSLFQQYPFDIPTEAFSFEIFKQAFVAIQSCVVHLQNVGLARRFALVPLGPPLLAYCSNCKAMLTAVDGAVELVVDRPYKAGDPIVVWCGPQPNAKLLLNYGFVDEDNPYDRVIVEAALNTEGPQYQDKRMVAQRNGKLSQQVFQVRVGKEREAVQDMLPYLRLGYMSDPSEMQSVISSQGPVCPMSPCMERAVLDQLANYFMRRLSGYPTTPKEDDALLADPSLSPRKRVATRLVQLEKKILVACLTTTVDLLNQLPDTAISPCPAPYAPSLK

SEQ ID NO: 112 - protein, 537 aa, Arabidopsis thaliana
  misc_feature: Public GI ID no.7573451
  misc_feature: Score of 1060.0 for HMM of FIGURE 8.
  misc_feature (377)..(479): Pfam Name: Rubis-subs-bind Pfam Description: Rubisco LSMT substrate-binding
  misc_feature (81)..(354): Pfam Name: SET Pfam Description: SET domain
  misc_feature: Functional Homolog Of Ceres SEEDLINE ID no. ME00922 at SEQ ID NO. 102
MEGVITCFHTKCVSLPIRSFPLSRVSSLPRWRNNKLISSSRSVHLRSLCVSSSDTLVASGSPKEDERQSKVSSKKEGDDSEDLKFWMDKNGLPPCKVILKERPAHDQKHKPIHYVAASEDLQKGDVAFSVPDSLVVTLERVLGNETIAELLTTNKLSELACLALYLMYEKKQGKKSVWYPYIRELDRQRGRGQLDAESPLLWSEAELDYLTGSPTKAEVLERAEGIKREYNELDTVWFMAGSLFQQYPFDIPTEAFSFEIFKQAFVAIQSCVVHLQVVLVASSNLDCYASSCTQNVGLARRFALVPLGPPLLAYCSNCKAMLTAVDGAVELVVDRPYKAGDPIVVWCGPQPNAKLLLNYGFVDEDNPYDRVIVEAALNTEDPQYQDKRMVAQRNGKLSQQVFQVRVGKEREAVQDMLPYLRLGYMSDPSEMQSVISSQGPVCPMSPCMERAVLDQLANYFMRRLSGYPTTPKEDDALEASCNPACPTGEENTSCMPYDNSSCCSCNLWDMAGVIFGRVLDHYNLRSLNYGQFLCVQV

SEQ ID NO: 113 - DNA, 1953 bp, Arabidopsis thaliana
  misc_feature: Ceres CLONE ID no.24159
  misc_feature: Encodes the peptide sequence at SEQ ID NO 114
aatgaaaaaaataatctgagaaaacgcaaaagaagaacggagcaaaatcttcagaatcgtcgccggagaatctttacgtttcgacataatcggaattttggaattgataattccgatggaaggggttatcacatgtttccatacgaaatgcgtctctcttccaattcgttctttcccactttctagggtttcttcacttcctcggtggaggaacaataaattgatctcttcatcgcgatcggttcatctaagaagcttgtgcgtttcggcttcgagctcagatactttagtcgcgggcggttcaccaaaggaagacgagaggcagagcaaagtatcgagcaagaaggaaggagatgactccgaggatttgaagttttggatggataagaatgggttgccaccttgcaaggttattctcaaggagagaccagctcatggatcagaagcataaacctatacattatgttgcttctagtgaggatcttcagaagggtgatgtggcgttttcagttcctgattctctggtggtcactctggaaagagttttgggaaacgagactattgctgaactgttgacgacgaacaaattatccgaactggcttgtctagctttgtatttgatgtatgagaagaaacaaggaaagaaatcagtatggtatccctatataagagaacttgatcgtcaaagaggaagaggtcagttagatgcggaatcccctttgctgtggtcagaggctgagttagattacctaactggtagtcctaccaaggccgaagttcttgagagggctgaagggatcaaaagagaatacaatgagcttgacactgtctggttcatggctggatctttgtttcagcaatacccatttgacataccaactgaagctttttcatttgagattttcaaacaggcatttgttgccattcagtcatgtgtggtgcatttacaaaatgtcggtttggctcgtcggtttgctttggttcctcttggtcctcccttgttggcctattgttccaactgcaaggcaatgcttactgctgttgatggtgctgttgaactcgtggtagataggccatataaggccggggatcctatagttgtctggtgtgggccacaaccaaatgcgaaattgcttctgaactatggatttgttgatgaggataacccttatgatagagtaatagttgaggcagcgttgaacactgaggatcctcaataccaggacaagagaatggttgctcaaaggaacggaaaattatcccaacaagtatttcaggttcgtgtgggaaaagaaagagaagctgttcaagacatgcttccctacctgcggttgggttacatgtctgatccttctgaaatgcagtcagtaatttcatcccaaggtccagtttgtccgatgagcccttgtatggaaagagcagtactagatcagcttgctaattacttcatgagacggttatctggctaccctactactccgaaagaagatgatgcattgttggcagatcctagtttgagtcctaggaagcgagttgcaacccggcttgtccaactggagaagaaaatactagttgcatgccttacgacaacagttgatcttttaaatcagttgcccgatacagccatctctccatgcccagcaccatatgctccttccttgaaataaaaaggttcgtgttgtagctgcaatttgtgggacatggcaggagtaatttttggtcgtgtccttgatcattacaatctgaggtcgcttaactacggtagataagggtgtactaggagcgttatctgccgcttgacacgcaaatgtttcagcatatgattgtcctttttttcttacaacaatgaagccttaagtcgcattgttcaaagtgtacatacatgaatgaaccttcttgttcttccccaactccctctgtaatgttttatctctgttttagaaatttagaatc

SEQ ID NO: 114 - protein, 425 aa, Arabidopsis thaliana
  misc_feature: Ceres CLONE ID no.24159
  misc_feature: Score of 1010.8 for HMM of FIGURE 8.
  misc_feature (26)..(247): Pfam Name: SET Pfam Description: SET domain
  misc_feature (270)..(394): Pfam Name: Rubis-subs-bind Pfam Description: Rubisco LSMT substrate-binding
  misc_feature: Functional Homolog Of Ceres SEEDLINE ID no. ME00922 at SEQ ID NO. 102
MGCHLARLFSRRDQLMDQKHKPIHYVASSEDLQKGDVAFSVPDSLVVTLERVLGNETIAELLTTNKLSELACLALYLMYEKKQGKKSVWYPYIRELDRQRGRGQLDAESPLLWSEAELDYLTGSPTKAEVLERAEGIKREYNELDTVWFMAGSLFQQYPFDIPTEAFSFEIFKQAFVAIQSCVVHLQNVGLARRFALVPLGPPLLAYCSNCKAMLTAVDGAVELVVDRPYKAGDPIVVWCGPQPNAKLLLNYGFVDEDNPYDRVIVEAALNTEDPQYQDKRMVAQRNGKLSQQVFQVRVGKEREAVQDMLPYLRLGYMSDPSEMQSVISSQGPVCPMSPCMERAVLDQLANYFMRRLSGYPTTPKEDDALLADPSLSPRKRVATRLVQLEKKILVACLTTTVDLLNQLPDTAISPCPAPYAPSLK

SEQ ID NO: 115 - DNA, 1572 bp, Populus balsamifera subsp. trichocarpa
  misc_feature: Ceres ANNOT ID no.1482610
  misc_feature: Encodes the peptide sequence at SEQ ID NO 116
atggaattcacttgtttacacaacaaatgcatttcaccttctcttactgttctctctagggtttcaatttcattttccaatcttcctaaacgcgccgtttcatttcaccggcggcggagaaatttgtgctttgcaacattagtcgatgggaaacgtactagtgaagttgtgagcaaaagaggaggagaagaagaagacgaatttggggatttgaagtcttggatgcataaaaatggattgcctccttgcaaagttgtgcttaaagaaagaccttctcatgacaagaaacttcgacctattcattatgttgctgctagcgaggatcttcaggccagtgatgtggcggtttcggtgcccaattcgcttgttgttacactcgagagggttttgggaaatgagactcttgatagtgaaacccctcagcatgctataagtgaaaccatgataaatgtcagtgtgactaatttagcggaactcttaaccacaaacaaattatcggaattggcatgcttggccttatacctgatgtatgagaagaagcaaggaaagaagtcattctggtatccatatataagggagcttgatcgtcagcgaggtaggggtcagctggctgtggaatctccacttttatggtctgaggctgaattggcttacctgactggtagcccaactaaggctgaagttcttgacagggcagatggaattaaaagagaatatgaggagctagacactgtttggttcatggctggttctctgtttcagcaatatccatatgatatacctactgaagcctttccctttgagatttttaaacaagcttttgtagccattcaatcctgtgtggtgcatttacagaaagtcagtttggctcgaagatttgctttggttcctcttggaccacctttgctagcatacagtagcaactgcaaggcaatgttaactgctgttgatggtgctgttgaattagtggttgatcgaccatacaaggctggggagcccattgttgtatggtgtgggccacagccaaattcaaaattgcttttaaactatggctttgttgatgaagataatccttatgaccgaatagcagttgaggcagcactgaacactgaggaccctcagtatcaggacaagagaatggttgctcaaagaaatgggaaattgtcagtgcaagtttttcaagtatacgctggaaaggaaaaagaagccgtgtcagatattcttccttatttgcgattgggatatgtatcagatccttctgaaatgcaatctgtaatttcttctcaaggtccagtttgtccagtaagcccttgtatggaacaagcagtgttagatcagcttactgtttattttagaacgcgccttgctggctattgtaccagcataagtgaagatgagttgatgttggcagatcctaacttgaaccccaagaagcgagtggctactcagcttgttagattggaaaagaaaatgctgaaggcatgcttgcaggctacagttgatttgataaaccagttacctgatcacaccatgcctccatgcccagctccttatgcccctttattgaaatga

SEQ ID NO: 116 - protein, 523 aa, Populus balsamifera subsp. trichocarpa
  misc_feature: Ceres ANNOT ID no.1482610
  misc_feature: Score of 1242.8 for HMM of FIGURE 8.
  misc_feature (170)..(345): Pfam Name: SET Pfam Description: SET domain
  misc_feature (368)..(492): Pfam Name: Rubis-subs-bind Pfam Description: Rubisco LSMT substrate-binding
  misc_feature: Functional Homolog Of Ceres SEEDLINE ID no. ME00922 at SEQ ID NO. 102
MEFTCLHNKCISPSLTVLSRVSISFSNLPKRAVSFHRRRRNLCFATLVDGKRTSEVVSKRGGEEEDEFGDLKSWMHKNGLPPCKVVLKERPSHDKKLRPIHYVAASEDLQASDVAVSVPNSLVVTLERVLGNETLDSETPQHAISETMINVSVTNLAELLTTNKLSELACLALYLMYEKKQGKKSFWYPYIRELDRQRGRGQLAVESPLLWSEAELAYLTGSPTKAEVLDRADGIKREYEELDTVWFMAGSLFQQYPYDIPTEAFPFEIFKQAFVAIQSCVVHLQKVSLARRFALVPLGPPLLAYSSNCKAMLTAVDGAVELVVDRPYKAGEPIVVWCGPQPNSKLLLNYGFVDEDNPYDRIAVEAALNTEDPQYQDKRMVAQRNGKLSVQVFQVYAGKEKEAVSDILPYLRLGYVSDPSEMQSVISSQGPVCPVSPCMEQAVLDQLTVYFRTRLAGYCTSISEDELMLADPNLNPKKRVATQLVRLEKKMLKACLQATVDLINQLPDHTMPPCPAPYAPLLK

SEQ ID NO: 117 - protein, 501 aa, Medicago truncatula
  misc_feature: Public GI ID no.92872502
  misc_feature: Score of 1167.9 for HMM of FIGURE 8.
  misc_feature (346)..(470): Pfam Name: Rubis-subs-bind Pfam Description: Rubisco LSMT substrate-binding
  misc_feature (68)..(323): Pfam Name: SET Pfam Description: SET domain
  misc_feature: Functional Homolog Of Ceres SEEDLINE ID no. ME00922 at SEQ ID NO. 102
MELSHLSLSENHFFFSTPTSPSSLSHRLPSFLSLSTNHRRRRRSFCSASNSDTLVAATGKKKRDEDDGDLKTWMHKNGLPPCKVVLKDKPSLDDSVKPIHYVAASEDLQKGDIAFSVPNSLVVTLERVLGNETIAELLTTNKFSELACLALYLMYEKKQGKKSFWYPYIRELDRQRGRGQLAVESPLLWSESELAYLEGSPLKDEIVKRIEGIRKEYNELDTVWFMSGSLFQQYPYDLPTEAFPFEIFKQAFAAVQSCVVHLQNVSLARRFALVPLGPPLLAYCSNCKAMLTAVDGAVQLVVDRPYKAGDPIVVWCGPQPNTKLLTNYGFVDEDNSNDRLIVEVALSTEDPQYQDKRIVAQRNGKLSIQTFYVYTGKEREAVSDMIPYMRLGYVSDPSEMQSVISSQGPVCPVSPCMERAVLDQLADYFNTRLAAYPTTLAEDESMLTDGSLNPKRRVATQLVRLEKKMLHACLQAIMDLISQLPDHSVSPCPAPYAPSLK

SEQ ID NO: 118 - protein, 509 aa, Oryza sativa subsp. japonica; identical to SEQ ID NO: 105
  misc_feature: Public GI ID no.115487958
  misc_feature: Score of 1284.4 for HMM of FIGURE 8.
  misc_feature (114)..(331): Pfam Name: SET Pfam Description: SET domain
  misc_feature (354)..(478): Pfam Name: Rubis-subs-bind Pfam Description: Rubisco LSMT substrate-binding
  misc_feature: Functional Homolog Of Ceres SEEDLINE ID no. ME00922 at SEQ ID NO. 102

SEQ ID NO: 119 - protein, 505 aa, Oryza sativa subsp. indica
  misc_feature: Public GI ID no.125536207
  misc_feature: Score of 1263.4 for HMM of FIGURE 8.
  misc_feature (110)..(327): Pfam Name: SET Pfam Description: SET domain
  misc_feature (350)..(474): Pfam Name: Rubis-subs-bind Pfam Description: Rubisco LSMT substrate-binding
  misc_feature: Functional Homolog Of Ceres SEEDLINE ID no. ME00922 at SEQ ID NO. 102
MASSASVSPAAASHLPCSPRRLPRPRPRLRPRLLRSARPRLVACHADTLLPSSSPAAAAAACASTASANGFSDWLREHGLPPGKVAILDRPVPCFREGKDLPLHYVAAGQDLEAGDVAFEVPMSLVVTLERVLGDESVAELLTTNKLSELACLALYLMYEKKQGQDSFWYPYIKELDRQRGRGQLAVESPLLWTESELNYLKGSPIKDEVVARDEGIRREYNELDTLWFMAGSLFQQYPFDIPTEAFPFEIFKQAFVAVQSCVVHLQKVSLARRFALVPLGPPLLTYKSNCKAMLTAVGDSVRLVVDRPYKAGEPIIVWCGPQPNSRLLLNYGFIDEDNPYDRIVIEASLNIEDPQFQEKRMVAQRNGKLAIQNFHVCVGKEKETIAEMLPYLRLGYISDPDEMQSILSSEGDTCPVSPCTERAVLDQLVGYLESRLADYPTTLDEDDAMLADGNLEPKKEVATRLVRLEKKLLHGCLQAANEFINDLPDHTVSPCPAPFAPELK

SEQ ID NO: 120 - protein, 536 aa, Oryza sativa subsp. japonica
  misc_feature: Public GI ID no.125578929
  misc_feature: Score of 1091.8 for HMM of FIGURE 8.
  misc_feature (143)..(358): Pfam Name: SET Pfam Description: SET domain
  misc_feature (381)..(505): Pfam Name: Rubis-subs-bind Pfam Description: Rubisco LSMT substrate-binding
  misc_feature: Functional Homolog Of Ceres SEEDLINE ID no. ME00922 at SEQ ID NO. 102
MASSASVSPAAASHHRLLLPCSPRRLTRPRPRPRPAPPPLRPPPPRRLPRRHPPPLLVPRRRRRRVRLHRLRQRVLRLAAGARAAAGEGGHPRPTRPLLPGGQGPAAALRRRGAGSRGALASGDFGVDSGGKWCEIFDCGGLLQAGDVAFEVPMSLVVTLERVLGDESVAELLTTNKLSELACLALYLMYEKKQGQDSFWYPYIKELDRQRGRGQLAVESPLLWTESELNYLKGSPIKDEVVARDEGIRREYNELDTLWFMAGSLFQQYPFDIPTEAFPFEIFKQAFVAVQSCVVHLQKVSLARRFALVPLGPPLLTYKSNCKAMLTAVGDSVRLVVDRPYKAGEPIIVWCGPQPNSRLLLNYGFIDEDNPYDRIVIEASLNIEDPQFQEKRMVAQRNGKLAIQNFHVCVGKEKETIAEMLPYLRLGYISDPDEMQSILSSEGDTCPVSPCTERAVLDQLVGYLESRLADYPTTLDEDDAMLADGNLEPKKEVATRLVRLEKKLLHGCLQAANEFINDLPDHTVSPCPAPFAPELK

SEQ ID NO: 121 - DNA, 1323 bp, Arabidopsis thaliana
  misc_feature: Ceres CLONE ID no.26560
  misc_feature: Encodes the peptide sequence at SEQ ID NO 122
aggaaagaaatcagtatggtatccctatataagagaacttgatcgtcaaagaggaagaggtcagttagatgcggaatcccctttgctgtggtcataggctgagttagattacctaactggtagtcctaccaaggccgaagttcttgagagggctgaagggatcaaaagagaatacaatgagcttgacactgtctggttcatggctggatctttgtttcagcaatacccatttgacataccaactgaagctttttcatttgagattttcaaacaggcatttgttgccattcagtcatgtgtgatgcatttacaaaatgtcggtttggctcgtcggtttgctttggttcctcttggtcctcccttgttggcctattgttccaactgcaaggcaatgcttactgctgttgatggtgctgttgaactcgtggtagataggccatataaggccggggatcctatagttgtctggtgtgggccacaaccaaatgcgaaattgcttctgaactatggatttgttgatgaggataacccttatgatagagtaatagttgaggcagcgttgaacactgaggatcctcaataccaggacaagagaatggttgctcaaaggaacggaaaattatcccaacaagtatttcaggttcgtgtgggaaaagaaagagaagctgttcaagacatgcttccctacctgcggttgggttacatgtctgatccttctgaaatgcagtcagtaatttcatcccaaggtccagtttgtccgatgagcccttgtatggaaagagcagtactagatcagcttgctaattacttcatgagacggttatctggctaccctactactccgaaagaagatgatgcattgttggcagatcctagtttgagtcctaggaagcgagttgcaacccggcttgtccaactggagaagaaaatactagttgcatgccttacgacagttgatcttttaaatcagttgcccgatacagccatctctccatgcccagcaccatatgctccttccttgaaataaaaaggttcgtgttgtagctgcaatttgtgggacatggcaggagtaatttttggtcgtgtccttgatcattacaatctgaggtcgcttaactacggtagataagggtgtactaggagcgttatctgccgcttgacacgcaaatgtttcagcatatgattgtcctttttttcttacaacaatgaagccttaagtcgcattgttcaaagtgtacatacatgaatgaaccttcttgttcttccccaactccctctgtaatgttttatctctgttttagaaatttagaatttatcatttcc

SEQ ID NO: 122 - protein, 275 aa, Arabidopsis thaliana
  misc_feature: Ceres CLONE ID no.26560
  misc_feature: Ceres SEEDLINE ID no. ME22365
  misc_feature: Score of 434.2 for HMM of FIGURE 8.
  misc_feature (1)..(98): Pfam Name: SET Pfam Description: SET domain
  misc_feature (121)..(245): Pfam Name: Rubis-subs-bind Pfam Description: Rubisco LSMT substrate-binding
  misc_feature: Functional Homolog Of Ceres SEEDLINE ID no. ME00922 at SEQ ID NO. 102
MAGSLFQQYPFDIPTEAFSFEIFKQAFVAIQSCVMHLQNVGLARRFALVPLGPPLLAYCSNCKAMLTAVDGAVELVVDRPYKAGDPIVVWCGPQPNAKLLLNYGFVDEDNPYDRVIVEAALNTEDPQYQDKRMVAQRNGKLSQQVFQVRVGKEREAVQDMLPYLRLGYMSDPSEMQSVISSQGPVCPMSPCMERAVLDQLANYFMRRLSGYPTTPKEDDALLADPSLSPRKRVATRLVQLEKKILVACLTTVDLLNQLPDTAISPCPAPYAPSLK

SEQ ID NO: 123 - DNA, 1266 bp, Glycine max
  misc_feature: Ceres CLONE ID no.463156
  misc_feature: Encodes the peptide sequence at SEQ ID NO 124
aaggatgaagttattcaaagggaagaagcaataagaaaagagtataatgaacttgacacagtctggtttatggcaggttctctatttcagcaatatccatatgacattcctactgaggccttttcatttgagattttcaaacaagcctttgctgctattcagtcttgtgtggtgcatttacagaaagttagtttagctcggagatttgctttagttcccctgggacctcctttactgtcctaccaaagcaactgcaaggcaatgctaactgctgttgatggcgctgttgagcttgcagttgatcgcccgtataaagccggggacccaattgttgtgtggtgtggccctcaacctaactcaaagttgcyyayaaactatggttttgttgatgaaaataattccaatgatcgtcttatagttgaggcagctttaaatactgaagatccacaatatcaagataaaagaatggtggctcaaagaaatggaaagttatcagttcaagtttttcatgtatatgctgggaaggaaagggaagctgtcttagatatgcttcgttatatgcgtttgggctatgtttcagatccttctgagatggaatctgtcatctcctctcaaggtccagtttgtcctgtaagcccttgtatggaacgggctgcgttggatcagttggctgattatttcaaggcacggctggctggctaccctacaacattggctgaagatgaatctatgctgacagatgataatctgaatccaaagaagcgagttgctacccaatatgttaggctggaaaagaaaatgctccatgcctgtttgcaggcaaccaccgacttcattaaccagcttccagaccacactatatctccatgccccgctccctatgcacctttattgaaatgaaaggaactggaaatgtatgtagtctgaactgtacaaatatggatttgatgaaccaggtcaattacaaatgcatatagttgaatcacggctcattgaacaatgatgcaagagttccggatttaaaaggttatgggtctgcctttccccctgaagataaaatctcaatccgagtgttttctgcatgcccccttcaggtaggcgtgtcgcttcattccctaggtaggacttaggaggaaaggaaccatcatttgagcaaatttttgtgtcttactgtaattgtaccgacgattcgaaatttgagtgttggaatgatactcaactttgtaaatggaaacctgaatcccaaatcctaattcaattgtgcat

SEQ ID NO: 124 - protein, 276 aa, Glycine max
  misc_feature: Ceres CLONE ID no.463156
  misc_feature: Score of 446.3 for HMM of FIGURE 8.
  misc_feature (1)..(98): Pfam Name: SET Pfam Description: SET domain
  misc_feature (121)..(245): Pfam Name: Rubis-subs-bind Pfam Description: Rubisco LSMT substrate-binding
  misc_feature: Functional Homolog Of Ceres SEEDLINE ID no. ME00922 at SEQ ID NO. 102
MAGSLFQQYPYDIPTEAFSFEIFKQAFAAIQSCVVHLQKVSLARRFALVPLGPPLLSYQSNCKAMLTAVDGAVELAVDRPYKAGDPIVVWCGPQPNSKLPTNYGFVDENNSNDRLIVEAALNTEDPQYQDKRMVAQRNGKLSVQVFHVYAGKEREAVLDMLRYMRLGYVSDPSEMESVISSQGPVCPVSPCMERAALDQLADYFKARLAGYPTTLAEDESMLTDDNLNPKKRVATQYVRLEKKMLHACLQATTDFINQLPDHTISPCPAPYAPLLK

SEQ ID NO: 125 - DNA, 1276 bp, Panicum virgatum
  misc_feature: Ceres CLONE ID no.1998672
  misc_feature: Encodes the peptide sequence at SEQ ID NO 126
aaaacctcctccgccgccgctgcagcgctccaccgccaccgcccctcccaaccgtcgcctcgccattccccgcctgaatccctaacgcccatggcctccgtttcccccgccgccgctgcagccgccgtctccggccccccaccacgcccgcctcctcctcccctcctcgcttcgccgcctcccgcggccccgcccgcgccctcgtccgcgtctccgcctcgccgcctgccacgcggatacgctgctcccctcctcctcctcatcggaggcccgcgcgcggccggcccccgcggtggggccctccgccgaatctgccacagactgtttcgtcgactggctgcgcgcgcgcgggctgcccccgggcaaagtggatatccgggagcggccggtgccctgcctgcgcgagggcggggaccgcccgttgcgctacatcgctgccggcgatgccctccaggttagagccgtagggcgtgggttttggattccggcagtaatgacgcgatcatgacctggatttggttggctccgtcgtttgttgtgcaggcgggggatgtggcgttcgaggtgcccatgtcactcgtcgtcacgctggagcgggttctcggggacgaatcagtagctgagttgttgacaaacaacaagttatctgagttggcatgcttggctttatatctcatgtatgagaaaaagcaaggaaaggattcatattggtacccctacattaaggagctcgaccgacaccgaggaaggggacaactagctgtggaatcaccacttttatggactgaaagtgaacttgattacctgactggaagcccattaaaggatgaagttgttgctagagatgaggcggtaaggagagagtataatgagcttgacacagtgtggttcatggcaggttcactgtttcagcaatacccttttgatatacctactgaggcttttccgtttgagatattcaaacaagcttttgttgcagtacagtcttgtgtggttcatctgcagaaagttagtttagctcgaagattcacactagttcctttggggccaccactattgacctacaagagcaactgcaaagcgatgttgacagctgatggtgattctgttcggttggtggtggatcggccatataaagctggagaaccaataatcgtctggtgtggaccacaaacaaactccaggctggttctgaactatggttttgttgatgaagacaatccctttgatcgcatatcaattgaggcatcgttaaatacagaagatcctcattacc

SEQ ID NO: 126 - protein, 257 aa, Panicum virgatum
  misc_feature: Ceres CLONE ID no.1998672
  misc_feature: Score of 314.9 for HMM of FIGURE 8.
  misc_feature (12)..(227): Pfam Name: SET Pfam Description: SET domain
  misc_feature: Functional Homolog Of Ceres SEEDLINE ID no. ME00922 at SEQ ID NO. 102
MTWIWLAPSFVVQAGDVAFEVPMSLVVTLERVLGDESVAELLTNNKLSELACLALYLMYEKKQGKDSYWYPYIKELDRHRGRGQLAVESPLLWTESELDYLTGSPLKDEVVARDEAVRREYNELDTVWFMAGSLFQQYPFDIPTEAFPFEIFKQAFVAVQSCVVHLQKVSLARRFTLVPLGPPLLTYKSNCKAMLTADGDSVRLVVDRPYKAGEPIIVWCGPQTNSRLVLNYGFVDEDNPFDRISIEASLNTEDPHY

SEQ ID NO: 127 - protein, 199 aa, Zea mays
  misc_feature: Public PUBLICCLONE ID no.100926461
  misc_feature: Score of 116.8 for HMM of FIGURE 8.
  misc_feature (13)..(144): Pfam Name: SET Pfam Description: SET domain
  misc_feature: Functional Homolog Of Ceres SEEDLINE ID no. ME00922 at SEQ ID NO. 102
MSLVVTLERVLGDESIAELLTNNKLSELACLALYLMYEKKQGKDSFWYPYIKELDRHRGRGQLAVESPLLWTESELDYLTGSPLKDEVVARDEAIRREYNELDTLWFMAGSLFQQYPFDIPTEAFPFEIFKQAFVAVQSCVVHLQKVSLARRFALVPLGPPLLTYRSNCKAMLTADGDSVRLGVDRPYKAGEPIIIWCG

SEQ ID NO: 128 - protein, 282 aa, Arabidopsis thaliana
  misc_feature: Ceres SEEDLINE ID no. ME02077
  misc_feature: Expected Sequence
  misc_feature: Score of 643.8 for HMM of FIGURE 3.
  misc_feature (135)..(187): Pfam Name: AP2 Pfam Description: AP2 domain
  misc_feature: Functional Homolog Of Ceres SEEDLINE ID no. ME02077 at SEQ ID NO. 79
MATPNEVSALFLIKKYLLDELSPLPTTATTNRWMNDFTSFDQTGFEFSEFETKPEIIDLVTPKPEIFDFDVKSEIPSESNDSFTFQSNPPRVTVQSNRKPPLKIAPPNRTKWIQFATGNPKPELPVPVVAAEEKRHYRGVRMRPWGKFAAEIRDPTRRGTRVWLGTFETAIEAARAYDKEAFRLRGSKAILNFPLEVDKWNPRAEDGRGLYNKRKRDGEEEEVTVVEKVLKTEESYDVSGGENVESGLTAIDDWDLTEFLSMPLLSPLSPHPPFGYPQLTVV

SEQ ID NO: 129 - DNA, 747 bp, Gossypium hirsutum
  misc_feature: Ceres CLONE ID no.1935323
  misc_feature: Encodes the peptide sequence at SEQ ID NO 130
aacgaacttccaaatcttctcttcttcaatttcgaatttccagtccacaaaattcaaatccttagcttttccttttccttttttttttgaaaaaatttcaaattttttattatggaagcaagcagtgaagtaacaagtgcgcttcaatatatcaagcaatatttactcggtgagttttctccagtgggattagggagtgtttcaagtgaaaatcagtggttacctcagtcgaaacctcgagtttcgagctctggatctgaatctcatttgagctccgattcgtcttttacagtatcaaattttaattgcctcgacgatgatgatgatttctttcaattccctaccgatttccctggattccaatttgaatcaaaacctcaaattatcgatctgacgacacctaaatccctctcatcaaacgccggtgctttcgaatttgaagtcaaacctcagatcgctcaaatttcaacgacgaaacataaagtttcttcgaattcgagctctcagaatcggaaacggtcgctgaaaatctcgttgccgcataaaatggagcagattcagttcggtaaaacggatttagctcaggcggagccgaaagtctcaaattccgaagacaagaagcattatagaggagtccgacaaaggccgtgggggaagttcgcggccgaaatccgagatccgacccgacgagggtctaggatgtggctaggaaccttcgaaacgggcatcgaagccgcgaaggcttac

SEQ ID NO: 130 - protein, 212 aa, Gossypium hirsutum
  misc_feature: Ceres CLONE ID no.1935323
  misc_feature: Score of 77.7 for HMM of FIGURE 3.
  misc_feature (170)..(212): Pfam Name: AP2 Pfam Description: AP2 domain
  misc_feature: Functional Homolog Of Ceres SEEDLINE ID no. ME02077 at SEQ ID NO. 79
MEASSEVTSALQYIKQYLLGEFSPVGLGSVSSENQWLPQSKPRVSSSGSESHLSSDSSFTVSNFNCLDDDDDFFQFPTDFPGFQFESKPQIIDLTTPKSLSSNAGAFEFEVKPQIAQISTTKHKVSSNSSSQNRKRSLKISLPHKMEQIQFGKTDLAQAEPKVSNSEDKKHYRGVRQRPWGKFAAEIRDPTRRGSRMWLGTFETGIEAAKAY

SEQ ID NO: 131 - protein, 237 aa, Nicotiana tabacum
  misc_feature: Public GI ID no.12003376
  misc_feature: Score of 126.9 for HMM of FIGURE 3.
  misc_feature (134)..(186): Pfam Name: AP2 Pfam Description: AP2 domain
  misc_feature: Functional Homolog Of Ceres SEEDLINE ID no. ME02077 at SEQ ID NO. 79
MTESSSSQSESASSDSLPFDFLSDSFDFEADFFQFGDEVSNSSSESANSVHNSTNFIMLELEPTISSSDYEKPQVIIDLTSPKLSNVSDRKPSLKIDLPPVKKFEWIGFCNSTTQSNSIVSVTMQQKRKTEEKRHYRGVRQRPWGKYAAEIRDPTRRGARVWLGTFNTAVEAAKAYDRAAFKMRGSKAILNFPLEVGKNLSYSSSAVDGGVKRRKESDACGEEKGVKKVERCKEEES

SEQ ID NO: 132 - protein, 250 aa, Arabidopsis thaliana
  misc_feature: Public GI ID no.8843855
  misc_feature: Score of 124.5 for HMM of FIGURE 3.
  misc_feature (70)..(122): Pfam Name: AP2 Pfam Description: AP2 domain
  misc_feature: Functional Homolog Of Ceres SEEDLINE ID no. ME02077 at SEQ ID NO. 79
MASSHQQQQEQDQSALDLITQHLLTDFPSLDTFASTIHHCTTSTLSQRKPPLATIAVPTTAPVVQENDQRHYRGVRRRPWGKYAAEIRDPNKKGVRVWLGTFDTAMEAARGYDKAAFKLRGSKAILNFPLEAGKHEDLGDNKKTISLKAKRKRQVTEDESQLISRKAVKREEAQITINVQPKEIQNVQDAQIEEKTNAPPELRLPDVLDAKVVTCSRHTTWQDYVDYFKSPNQRKQPERNTEDESVLIAF

SEQ ID NO: 133 - DNA, 850 bp, Gossypium hirsutum
  misc_feature: Ceres CLONE ID no.1850283
  misc_feature: Encodes the peptide sequence at SEQ ID NO 134
attaattcttgaaaaagttttcaaggaaatgaccagcgttgaagaatcaacgacactcgagttcattcatcagcacctccttggagacttcacttcggctgatgcttttataagtagccttgattttggcctctctcaactacaaaattaccaggttcccgaactgtatcaacctcactctcccgtatctgacccgaattgccgaatccctgaaatcttcggctatgacgtaaaacctgaggttgttgagctggcatctccgagtgtgttcatttcagggtcgaaaatggagcagaaggtgttggtttgtgaagagaggaggcattacagaggggtgcggagaaggccatggggaaagtttgctgcagagatccgagacccgaccaggaagggacgtcgggtttggctaggtactttcgataccgatgttgatgctgccaaggcttatgattgtgcagcatttaaaatgagggggcagaaagcaatactgaatttcccactggaagctggacaggctactccaccagccacaacttgtaggaaaaggggaaaagagaagagaaataagtcgccggaaagtgacgtcatgtcacaagttagtagtgagctagcttcggcggtggtgaaggaagaagaggataagccttattgatggtcagaatatcacctgtcaccattataattagaagaagataacatgatagataatgtgaattcggtaagctgttaaaagggaggcatttaaatcacgcaccatcaaaaaatgtatatttagaagtctaattattgagttgctttgcaagttcagttggaatttgatcagtgattacaaaaaaaaaaaaaaaaaaaa

SEQ ID NO: 134 - protein, 207 aa, Gossypium hirsutum
  misc_feature: Ceres CLONE ID no.1850283
  misc_feature: Score of 98.2 for HMM of FIGURE 3.
  misc_feature (98)..(150): Pfam Name: AP2 Pfam Description: AP2 domain
  misc_feature: Functional Homolog Of Ceres SEEDLINE ID no. ME02077 at SEQ ID NO. 79
MTSVEESTTLEFIHQHLLGDFTSADAFISSLDFGLSQLQNYQVPELYQPHSPVSDPNCRIPEIFGYDVKPEVVELASPSVFISGSKMEQKVLVCEERRHYRGVRRRPWGKFAAEIRDPTRKGRRVWLGTFDTDVDAAKAYDCAAFKMRGQKAILNFPLEAGQATPPATTCRKRGKEKRNKSPESDVMSQVSSELASAVVKEEEDKPY

SEQ ID NO: 135 - protein, 208 aa, Arabis drummondii
  misc_feature: Public GI ID no.34013890
  misc_feature: Score of 59.2 for HMM of FIGURE 3.
  misc_feature (109)..(161): Pfam Name: AP2 Pfam Description: AP2 domain
  misc_feature: Functional Homolog Of Ceres SEEDLINE ID no. ME02077 at SEQ ID NO. 79
MATIEESSDLEAIQKHLFEDLMVSDGFMGDFDFDASFVSELWCIEPQVPKQEPDSPVFDPDSFVNEFLQVEAKSSPELNSSSSTYETDLSVKKAERFEEEEEEEEEEARHYRGVRRRPWGKFAAEIRDPAKKGSRIWLGTFESDVDAARAYDCAAFKLRGRKAVLNFPLEAGKYEAPANSGRKRKRSDVKEELQRTQSNSSSSSCDAF

SEQ ID NO: 136 - DNA, 550 bp, Zea mays
  misc_feature: Ceres CLONE ID no.1428135
  misc_feature: Encodes the peptide sequence at SEQ ID NO 137
aacacaatcaaaaccataaaccaacgactccaagtctctcatatatggcatcttcacaagaccaatcagctttggacctcatcactcaacacctccttaccgatttcccttccttagagactttcgtctctagcatccatcagagcaccacctccactcttagccaacgcaagccatctcttgccaccatttcagttcctactactgcaccggtggttcaagaggatgatcataggcattacaggggcgtgaggcgtaggccgtggggtaagtatgcggctgagatcagagacccaaacaagaaaggcgttcgtgtctggttaggtacttttgacacggccgtggaggctgcaagaggttacgacagggctgcttttaaactaagaggaagcaaagccattcttaacttcccactagaagcaggcaagcaccaggactctggagacaacaagaacaagaagactgtggctttgaaagctaagaggaagagaccagaaacagaggatgaaaaccatgagagaaacctgatcagtcataaagctgtgaaaag

SEQ ID NO: 137 - protein, 168 aa, Zea mays
  misc_feature: Ceres CLONE ID no.1428135
  misc_feature: Score of 93.5 for HMM of FIGURE 3.
  misc_feature (64)..(116): Pfam Name: AP2 Pfam Description: AP2 domain
  misc_feature: Functional Homolog Of Ceres SEEDLINE ID no. ME02077 at SEQ ID NO. 79
MASSQDQSALDLITQHLLTDFPSLETFVSSIHQSTTSTLSQRKPSLATISVPTTAPVVQEDDHRHYRGVRRRPWGKYAAEIRDPNKKGVRVWLGTFDTAVEAARGYDRAAFKLRGSKAILNFPLEAGKHQDSGDNKNKKTVALKAKRKRPETEDENHERNLISHKAVK

SEQ ID NO: 138 - DNA, 568 bp, Parthenium argentatum
  misc_feature: Ceres CLONE ID no.1605871
  misc_feature: Encodes the peptide sequence at SEQ ID NO 139
actcaaaacaattccttcaattcaataataatcaacccatctcttttattccttccttcactcacatggcgtcacctcatgaatcttcagcaccaatagacttcatccgccatcacttacttatcgacgaccttgttttctccgataataattcacccacttcttcttattcctcttcctcctctgttttcgatgaacagtttcactttaacccaatacctgaaccagtcatctgttcaaacacaagctttcacgaacgaaaaccctctctaaacatatccattccctttcctccaccggtgttgcagaaacccacgacggaggaacggcggcgttacagaggagttcgacaacggccgtggggaaagtttgcagcggagattcgagacccaaacaagaaagggtctagggtttggttagggacgtttgaaacagccgtagaggcagcaaaagcgtacgataaggcggcgtttaagcttcgtggtcgtaaagcgatattaaactttccgttagaagtcggaagtttaaatgagacggtggtggtgaagggtaatgggcgtaagaggat

SEQ ID NO: 139 - protein, 167 aa, Parthenium argentatum
  misc_feature: Ceres CLONE ID no.1605871
  misc_feature: Score of 121.0 for HMM of FIGURE 3.
  misc_feature (89)..(141): Pfam Name: AP2 Pfam Description: AP2 domain
  misc_feature: Functional Homolog Of Ceres SEEDLINE ID no. ME02077 at SEQ ID NO. 79
MASPHESSAPIDFIRHHLLIDDLVFSDNNSPTSSYSSSSSVFDEQFHFNPIPEPVICSNTSFHERKPSLNISIPFPPPVLQKPTTEERRRYRGVRQRPWGKFAAEIRDPNKKGSRVWLGTFETAVEAAKAYDKAAFKLRGRKAILNFPLEVGSLNETVVVKGNGRKR

SEQ ID NO: 140 - protein, 207 aa, Arabidopsis pumila
  misc_feature: Public GI ID no.38260669
  misc_feature: Score of 63.1 for HMM of FIGURE 3.
  misc_feature (108)..(160): Pfam Name: AP2 Pfam Description: AP2 domain
  misc_feature: Functional Homolog Of Ceres SEEDLINE ID no. ME02077 at SEQ ID NO. 79
MATFEDGSDLEAIQKHLFEDLLVCDGFMGDFDFDASFVSGLWCIEPQVPKQEPDSPVLDPDSFVNEFLQVEAESSPSSPELNTSPLSTYETDQSVKKAERFEEEEEARHYRGVRRRPWGKFAAEIRDPAKKGSRIWLGTFESDVDAARAYDCAAFKLRGRKAVLNFPLDAGKYEAPANSGRKRKRSDVQEELQRTQSNSSSSSCDAF

SEQ ID NO: 141 - protein, 207 aa, Arabidopsis arenosa
  misc_feature: Public GI ID no.38260631
  misc_feature: Score of 63.0 for HMM of FIGURE 3.
  misc_feature (108)..(160): Pfam Name: AP2 Pfam Description: AP2 domain
  misc_feature: Functional Homolog Of Ceres SEEDLINE ID no. ME02077 at SEQ ID NO. 79
MASFEESSDLEAIQSHLFEDLLACDGFMGDFDFDASFVSGLWCIESQVPKQEPDSPVLDPDSFVNEFLQVEGESSSSSSPELNSSSSTYETDQSVKKAERFEEEEEARHYRGVRRRPWGKFAAEIRDPAKKGSRIWLGTFESDVDAARAYDCAAFKLRGRKAVLNFPLDAGKYEAPANSGRKRKRSDVQEELQRTQSNSSSSSCDAF

SEQ ID NO: 142 - protein, 207 aa, Arabidopsis arenosa
  misc_feature: Public GI ID no.38260685
  misc_feature: Score of 65.4 for HMM of FIGURE 3.
  misc_feature (108)..(160): Pfam Name: AP2 Pfam Description: AP2 domain
  misc_feature: Functional Homolog Of Ceres SEEDLINE ID no. ME02077 at SEQ ID NO. 79
MASFQESSDLEAIQSHLFEDLLVCDGFMGDFDFDASFVSGLWCIEPQVPKQEPDSPVLDPDSFVNEFLQVEGESSSSSPELNSSSSSTYETDQSVKKAERFEEEEEARHYRGVRRRPWGKFAAEIRDPAKKGSRIWLGTFESDVDAARAYDCAAFKLRGRKAVLNFPLDAGKYEAPANSGRKRKRSDVQEELQRTQSNSSSSSCDAF

SEQ ID NO: 143 - protein, 345 aa, Oryza sativa
  misc_feature: Public GI ID no.14140143
  misc_feature: Score of 103.1 for HMM of FIGURE 3.
  misc_feature (153)..(205): Pfam Name: AP2 Pfam Description: AP2 domain
  misc_feature: Functional Homolog Of Ceres SEEDLINE ID no. ME02077 at SEQ ID NO. 79
MDFSGDIDDLISLQLLHDQLLGVEADACLPVAVHHDGVAAFAEHQQGFHPAAFLPQQPMTMTPAGYVDMANDQYLGAHAAAGEAEAVYRAAAAEPVMIRFGGEVSPVSDPRRPPLTISLPPTSHAWAAAEAVHPAALLQAQAAAAAADPNDFRKYRGVRQRPWGKFAAEIRDPKKRGSRVWLGTYDTAIEAARAYDRAAFRMRGAKAILNFPNEVGSRGADFLAPPPPPPPPTTSTHGKRKRHETAAADPDVEVIGESSKSVKTETYTSPASSSLASTTTSTVTSSSTSPSPSSEAAACGGGGGSELFVPPMPSSWSWDQLEGFFGILSPLSPHPQMGFPEVAVN

SEQ ID NO: 144 - protein, 344 aa, Oryza sativa subsp. japonica
  misc_feature: Public GI ID no.115447673
  misc_feature: Score of 96.1 for HMM of FIGURE 3.
  misc_feature (153)..(205): Pfam Name: AP2 Pfam Description: AP2 domain
  misc_feature: Functional Homolog Of Ceres SEEDLINE ID no. ME02077 at SEQ ID NO. 79
MDFSGDIDDLISLQLLHDQLLGVEADACLPVAVHHDGVAAFAEHQQGFHPAAFLPQQPMTMTPAGYVDMANDQYLGAHAAAGEAEAVYRAAAAEPVMIRFGGEVSPVSDPRRPPLTISLPPTSHAWAAAEAVHPAALLQAQTAAAAADPNDFRKYRGVRQRPWGKFAAEIRDPKKRGSRVWLGTYDTAIEAARAYDRAAFRMRGAKAILNFPNEVGSRGADFLAPPPPPPPPTTSTHGKRKRHETAAADPDVEVIGESSKSVKTETYTSPASSSLASTTTSTVTSSSTSPSPSSEAAACGGGGGELFVPPMPSSWSWDQLEGFFGILSPLSPHPQMGFPEVAVN

SEQ ID NO: 145 - protein, 345 aa, Oryza sativa subsp. indica
  misc_feature: Public GI ID no.125540543
  misc_feature: Score of 102.6 for HMM of FIGURE 3.
  misc_feature (153)..(205): Pfam Name: AP2 Pfam Description: AP2 domain
  misc_feature: Functional Homolog Of Ceres SEEDLINE ID no. ME02077 at SEQ ID NO. 79
MDFSGDIDDLISLQLLHDQLLGVEADACLPVAVHHDGVAAFAEHQQGFHPAAFLPQQPMTMTPAGYVDMANDQYLGAHAAAGEAEAVYRAAAAEPVMIRFGGEVSPVSDPRRPPLTISLPPTSHAWAAAEAVHPAALLQAQAAAAAADPNDFRKYRGVRQRPWGKFAAEIRDPKKRGSRVWLGTYDTAIEAARAYDRAAFRMRGAKAILNFPNEVGSRGADFLAPPPPPPPPTTSTHGKRKRHETAAADPDVEVIGESSKSVKTETYTSPASSSLASTTTSTVTSSSTSPSPSSEAAACGGGGGGELFVPPMPSSWSWDQLEGFFGILSPLSPHPQMGFPEVAVN

SEQ ID NO: 146 - protein, 204 aa, Capsella rubella
  misc_feature: Public GI ID no.38260649
  misc_feature: Score of 53.9 for HMM of FIGURE 3.
  misc_feature (105)..(157): Pfam Name: AP2 Pfam Description: AP2 domain
  misc_feature: Functional Homolog Of Ceres SEEDLINE ID no. ME02077 at SEQ ID NO. 79
MATIEESSDLEAMQKHLFEDFLVSDGFLGDFDFDASFVSGLWCIEPQVPKQEPDSPVLDPDSFVNEFLQVEAKSSPELNTSSSSTYETDQCVKKAERFEEEVETRHYRGVRRRPWGKFAAEIRDPAKKGSRIWLGTFESDVDAARAYDCAAFKLRGRKAVLNFPLDAGKYEAPANSGRKRKRSDAQEELQRTHSNSSSSSCDAF

SEQ ID NO: 147 - protein, 218 aa, Sisymbrium irio
  misc_feature: Public GI ID no.38260618
  misc_feature: Score of 57.3 for HMM of FIGURE 3.
  misc_feature (115)..(167): Pfam Name: AP2 Pfam Description: AP2 domain
  misc_feature: Functional Homolog Of Ceres SEEDLINE ID no. ME02077 at SEQ ID NO. 79
MAAFEESTDLDAIQGHLFEDFMVSDGFMGDFDFNASFVSGLWCIEPVMNQVPKQEPDSPVLDPDSFVKEFLQVEAESSTSTGTTELNSSSQETDQSISTRKKSKRFEEQEEEEPRHYRGVRRRPWGKFAAEIRDPAKKGSRIWLGTFESDVDAARAYDCAAFKLRGRKAVLNFPLDAGKYEAPANSGRKRKRSDVQGELQRSQSNSSSSSSDGETTCE

SEQ ID NO: 148 - protein, 206 aa, Brassica oleracea
  misc_feature: Public GI ID no.38196019
  misc_feature: Score of 59.7 for HMM of FIGURE 3.
  misc_feature (108)..(160): Pfam Name: AP2 Pfam Description: AP2 domain
  misc_feature: Functional Homolog Of Ceres SEEDLINE ID no. ME02077 at SEQ ID NO. 79
MAAFEESSDLDAIQEHLLEDFLVADGFMGDFDFNASFVSGLWCIEPVMNQVPKQEPDSPVLDPDSFVREFLQVEAESSSEQNSSPHETDQSVSPRKEAKRLEEEEEPRHYRGVRRRPWGKFAAEIRDPAKKGSRIWLGTFESNVDAARAYDCAAFKLRGRKAVLNFPLDAGKYEAPVNLGRKRKRSDVQEELQRSQSNSSSSSSDL

SEQ ID NO: 149 - DNA, 1094 bp, Glycine max
  misc_feature: Ceres CLONE ID no.540272
  misc_feature: Encodes the peptide sequence at SEQ ID NO 150
aaaaatatctagttggaaggtttccccggagtctaaggttagagcacatgctagaacacaagattgcatttacatcataaagatgacctcttaattgactacagcaatttgagccaagactttcatgctgtggtgtggacctttgcccttgacagacaggcatatataaatatccaccttagctactaaccatttttaaaatccaatataatccacctcacaacaatattgtttcatcactcagatcccttaaagatgacaacagcagaagaaacttcaaacttggatctcatacgccaacacctattaggggaaaatatcatctcagactcctcctttttctccaatctccttcatcatcctatgaaacttgaagcaccctcatcaccagaatttgatttcacctcatatatctcagacaacacaagctttttcactttccttgaaggctatgatttgatggcagacatgaaatttgttgattcagacaacaccatcccttcaaaggaggttaagaaatgcaatatttctcctgaaccattggtgtcatcaaaagagaagccaaagaagttagaatacgataaggcaaagcgttataggggagttagaagaaggccttggggaaaatttgctgctgaaatccgtgaccctacaaggaaagggacaagggtttggcttggaacctttgacagtgaaattgatgcagctaaggcctatgattgtgctgctttcaagatgagggggcagaaggctattctgaacttccctcttgaggctggactgtctgatcctaagcctaacagttgtggcaggaaaaggagaagagagagccatgatcatgaattggagctgccacaagtccaagttcatcatggtgtttcctgagaaaaagtgagaagatataataatagatttagttgttttgtgagtagcattaagtttgttgcctagaaaaataaggttgctttgccttttagtttgtacgtagaagcaaggctaatgtgaaatgtctatatgaatctatgcaaaaagcatgttacgaaagttttactaactttgaggagttttaaaaaaatattaatcaattcttgttt

SEQ ID NO: 150 - protein, 209 aa, Glycine max
  misc_feature: Ceres CLONE ID no.540272
  misc_feature: Score of 69.0 for HMM of FIGURE 3.
  misc_feature (112)..(164): Pfam Name: AP2 Pfam Description: AP2 domain
  misc_feature: Functional Homolog Of Ceres SEEDLINE ID no. ME02077 at SEQ ID NO. 79
MTTAEETSNLDLIRQHLLGENIISDSSFFSNLLHHPMKLEAPSSPEFDFTSYISDNTSFFTFLEGYDLMADMKFVDSDNTIPSKEVKKCNISPEPLVSSKEKPKKLEYDKAKRYRGVRRRPWGKFAAEIRDPTRKGTRVWLGTFDSEIDAAKAYDCAAFKMRGQKAILNFPLEAGLSDPKPNSCGRKRRRESHDHELELPQVQVHHGVS

SEQ ID NO: 151 - protein, 207 aa, Arabidopsis thaliana
  misc_feature: Public GI ID no.7576196
  misc_feature: Score of 63.5 for HMM of FIGURE 3.
  misc_feature (108)..(160): Pfam Name: AP2 Pfam Description: AP2 domain
  misc_feature: Functional Homolog Of Ceres SEEDLINE ID no. ME02077 at SEQ ID NO. 79
MASFEESSDLEAIQSHLLEDLLVCDGFMGDFDFDASFVSGLWCIEPHVPKQEPDSPVLDPDSFVNEFLQVEGESSSSSSPELNSSSSTYETDQSVKKAERFEEEVDARHYRGVRRRPWGKFAAEIRDPAKKGSRIWLGTFESDVDAARAYDCAAFKLRGRKAVLNFPLDAGKYEAPANSGRKRKRSDVHEELQRTQSNSSSSSCDAF

SEQ ID NO: 152 - protein, 207 aa, Arabidopsis thaliana; identical to SEQ ID NO: 151
  misc_feature: Public GI ID no.79508406
  misc_feature: Score of 63.5 for HMM of FIGURE 3.
  misc_feature (108)..(160): Pfam Name: AP2 Pfam Description: AP2 domain
  misc_feature: Functional Homolog Of Ceres SEEDLINE ID no. ME02077 at SEQ ID NO. 79

SEQ ID NO: 153 - protein, 318 aa, Oryza sativa subsp. japonica; identical to SEQ ID NO: 88
  misc_feature: Public GI ID no.32490143
  misc_feature: Score of 134.6 for HMM of FIGURE 3.
  misc_feature (138)..(190): Pfam Name: AP2 Pfam Description: AP2 domain
  misc_feature: Functional Homolog Of Ceres SEEDLINE ID no. ME02077 at SEQ ID NO. 79

SEQ ID NO: 154 - DNA, 781 bp, Arabidopsis thaliana
  misc_feature: Ceres CLONE ID no.1335966
  misc_feature: Encodes the peptide sequence at SEQ ID NO 155
atcatcacttgcagattctttctctctttcgtaaaaatggcgagttttgaggaaagctctgatttggaagctatacagagccatctcttagaagacttgttggtttgtgatggtttcatgggagattttgacttcgatgcttcttttgtctcaggactttggtgtatagaaccacacgttcctaaacaagaacctgattctccagttcttgatccgtattctttcgtcaacgagttcttgcaagtggaaggggaatcatcatcatcatcatcaccagagctgaattcatcgtcatcaacatatgagactgatcagagtgtgaaaaaggcagagaggttcgaagaagaagtagatgctagacattaccgaggagtgaggcgaaggccgtgggggaaatttgcagcagagattcgagatccagcaaagaaaggatcaagaatctggctaggaacatttgagagtgatgttgatgctgcaagagcctatgactgtgcagctttcaagctccggggaagaaaagccgtgctcaacttccctcttgacgccgggaaatatgaagctccagcgaattcaggaaggaaaaggaagagaagtgatgtgcatgaagagcttcaaagaactcagagcaattcatcttcatcttcctgtgatgcattttagcatattaagagtgtgagcagtttccttaagttgtataaagtaattgtacagaggaaacgaattgtgtaggtttagtgtgcttgcaagttgcaacaaatgtgtatggatgttctgtttcttc

SEQ ID NO: 155 - protein, 207 aa, Arabidopsis thaliana
  misc_feature: Ceres CLONE ID no.1335966
  misc_feature: Score of 59.3 for HMM of FIGURE 3.
  misc_feature (108)..(160): Pfam Name: AP2 Pfam Description: AP2 domain
  misc_feature: Functional Homolog Of Ceres SEEDLINE ID no. ME02077 at SEQ ID NO. 79
MASFEESSDLEAIQSHLLEDLLVCDGFMGDFDFDASFVSGLWCIEPHVPKQEPDSPVLDPYSFVNEFLQVEGESSSSSSPELNSSSSTYETDQSVKKAERFEEEVDARHYRGVRRRPWGKFAAEIRDPAKKGSRIWLGTFESDVDAARAYDCAAFKLRGRKAVLNFPLDAGKYEAPANSGRKRKRSDVHEELQRTQSNSSSSSCDAF

SEQ ID NO: 156 - DNA, 1056 bp, Zea mays
  misc_feature: Ceres CLONE ID no.998737
  misc_feature: Encodes the peptide sequence at SEQ ID NO 157
accgcagctctcaagcgagatcgaggcagtgcgcacgccgtgcaggcctctcctccactcaaccgcgcgtcatggccatgttgcgcgagcatctcgacctcatccgcgctcacctcctcgacgacaaccacgacgccgtcagctccgatgactcggcgccgtcccactcgccatcgccatccccatcgccgccggggcgtaggccgctgccagcgctttccgtctcgctgcccccgaggccggcagtcgtcctgcagcagcagcacatgagggcggcggcgccgccgttgcagattcctcagcaggagcagcactgctgcccggaacccgaggaggacgatttccggcggtaccgcggcgtgcggcagcggccgtggggcaagtacgcggccgagattcgggacccgtcgcggaagggcgcgcgcgtgtggctgggcacctatgacaccgccgtggaggccgctcgtgcctacgaccgcgccgcgttccgcctgcgcgggtccaaggccatcctcaacttccccaacgaggtcgcgttaagcaccgctgcatggtgggcgacgcctgctcctcctcctcagcccagcgcgaccgtggccggtaacaagagggcgaggtcgccgcaggagcaggacgctaggtgcatggttagggaggtgaagaaggagcggattcaggagcccgcaagcggaggggcggactacttctgggaggatgagtcgctgaagggggcgatctgcagcctgccgccgctctcaccgttgtcgccgcacccgcacctggccgtgccgcagctctacgtcagctgactgcctgacttgatgtcgtagcaagacagggacggtggtcttactcttacctgatgatagtcttctgagttctttgatatgctagaggagtatagctccaaatattctttcgttctttatttattcgttcagtcgcaagcaagcaaacgtgtcctggcgtagcatgactgcatgagaatactataatggacaatttttaaatataatatataataaataaaagataatttatatagtaacatgattg

SEQ ID NO: 157 - protein, 245 aa, Zea mays
  misc_feature: Ceres CLONE ID no.998737
  misc_feature: Score of 124.9 for HMM of FIGURE 3.
  misc_feature (92)..(144): Pfam Name: AP2 Pfam Description: AP2 domain
  misc_feature: Functional Homolog Of Ceres SEEDLINE ID no. ME02077 at SEQ ID NO. 79
MAMLREHLDLIRAHLLDDNHDAVSSDDSAPSHSPSPSPSPPGRRPLPALSVSLPPRPAVVLQQQHMRAAAPPLQIPQQEQHCCPEPEEDDFRRYRGVRQRPWGKYAAEIRDPSRKGARVWLGTYDTAVEAARAYDRAAFRLRGSKAILNFPNEVALSTAAWWATPAPPPQPSATVAGNKRARSPQEQDARCMVREVKKERIQEPASGGADYFWEDESLKGAICSLPPLSPLSPHPHLAVPQLYVS

SEQ ID NO: 158 - protein, 329 aa, Zea mays
  misc_feature: Public PUBLICCLONE ID no.100936085
  misc_feature: Score of 116.9 for HMM of FIGURE 3.
  misc_feature (142)..(194): Pfam Name: AP2 Pfam Description: AP2 domain
  misc_feature: Functional Homolog Of Ceres SEEDLINE ID no. ME02077 at SEQ ID NO. 79
  misc_feature (210)..(210): Xaa is any aa, unknown, or other
MDFSGEIDDFSLQLIREQLLGGEASLPIVTNAAAYSASVVHHPTQAEFHQPAAFLPQPSHVAYVDLTNEYAADATVASAGGEAAFRAEPVMIRFGGEPSPVSDPSRRPLLTISLPPASHAWGPAAVPLEAPGAAALDANDFRKYRGVRQRPWGKFAAEIRDPKKRGSRVWLGTYDTAIEAARAYDRAAFRMRGAKAILNFPNEVGTRGAXFLAPPPPPPQAAATSQNKRKLMHDAEATAPAGAGAGAEPAKSVKAEASGSPASSLFPATTTTPASTVTTCFPSSDAGAGPEMFPVTPSSWTWEQLEGVFGILSPLSPHPQLGFPEVTVN

SEQ ID NO: 159 - DNA, 660 bp, Populus balsamifera subsp. trichocarpa
  misc_feature: Ceres ANNOT ID no.1537977
  misc_feature: Encodes the peptide sequence at SEQ ID NO 160
atggcaaccccggaagaatcctcaacattagaactcataagacaacatcttcttggagacttcatctccacagacgagtttatcagtaatcttgagtccagtatagccagtgtctctgtcaaactagagagctccctttctgggtcagaacccaactccccaatatccgaccaaagttaccatagtaccccagaaacctatagctttgaaataaaacctgaaatcatagacttcacacctcctgagcccgtgttttcagataaaggagaaacagtaaggcattacaggggggtccgaagaaggccatggggcaagtttgcagcagagatccgtgaccctacccggaagggaagtcgggtttggttgggtacttttgacagtgatactgatgctgcaaaagcttatgactgtgctgcattcaaaatgaggggcaggaaagcaatcctgaattttccttcggaggctggactatccatcccgccgccagccacaggcaggaagagaagaagatcgaagggagaagaggtgctgccggaatctgttgatgtgtcaacggaaaattggaatttaaagtggagtggagaagtagaggagggtgtttcagatgaggagcaactgtcaccgttaacccaagaaaccatgttggcaaggctttcttaa

SEQ ID NO: 160 - protein, 219 aa, Populus balsamifera subsp. trichocarpa
  misc_feature: Ceres ANNOT ID no.1537977
  misc_feature: Score of 126.7 for HMM of FIGURE 3.
  misc_feature (93)..(145): Pfam Name: AP2 Pfam Description: AP2 domain
  misc_feature: Functional Homolog Of Ceres SEEDLINE ID no. ME02077 at SEQ ID NO. 79
MATPEESSTLELIRQHLLGDFISTDEFISNLESSIASVSVKLESSLSGSEPNSPISDQSYHSTPETYSFEIKPEIIDFTPPEPVFSDKGETVRHYRGVRRRPWGKFAAEIRDPTRKGSRVWLGTFDSDTDAAKAYDCAAFKMRGRKAILNFPSEAGLSIPPPATGRKRRRSKGEEVLPESVDVSTENWNLKWSGEVEEGVSDEEQLSPLTQETMLARLS

SEQ ID NO: 161 - protein, 328 aa, Oryza sativa subsp. japonica
  misc_feature: Public GI ID no.115459750
  misc_feature: Score of 113.4 for HMM of FIGURE 3.
  misc_feature (137)..(189): Pfam Name: AP2 Pfam Description: AP2 domain
  misc_feature: Functional Homolog Of Ceres SEEDLINE ID no. ME02077 at SEQ ID NO. 79
MDFHHGDADDFALEFIREHLLGVDGATATATEPADLEVVEPAAAYPPMSWQEQRQQEQHGCHVELTDEHLESAPAAEAAAAFRTAPAQPAAEVMIKFGGEPSPVRPSSSLTISLPPSSFGSWASAAAPAAAAVEDFRKYRGVRQRPWGKFAAEIRDPKRRGSRVWLGTYDTPVEAARAYDRAAFRMRGAKAILNFPNEVGTRGAELWAPPPPPPAHSAAASTTNKRKRQPSEDPDDGVEVIGVVSKAVKTEAPTSNSSSLSSSLTSRDTTPATSSAGAEHAGAAAESSPATPSSWSWEQYWEALLGGLPPLSPLSPHPALGFPQLTVN

SEQ ID NO: 162 - protein, 328 aa, Oryza sativa subsp. indica
  misc_feature: Public GI ID no.125549239
  misc_feature: Score of 113.6 for HMM of FIGURE 3.
  misc_feature (137)..(189): Pfam Name: AP2 Pfam Description: AP2 domain
  misc_feature: Functional Homolog Of Ceres SEEDLINE ID no. ME02077 at SEQ ID NO. 79
MDFHHGDADDFALEFIREHLLGVDGATATATEPADLEVVEPAAAYPPMSWQEQRQQEQHGCHVELTDEHLESAPAAEAAAAFRTAPAQPAAEVMIKFGGEPSPVRPSSSLTISLPPSSFGSWASAAAPAAAAVEDFRKYRGVRQRPWGKFAAEIRDPKRRGSRVWLGTYDTPVEAARAYDRAAFRMRGAKAILNFPNEVGTRGTELWAPPPPPPAHSAAASTTNKRKRQPSEDPDDGVEVIGVVSKAVKTEAPTSNSSSLSSSLTSRDTTPATSSAGAEHAGAAAESSPATPSSWSWEQYWEALLGGLPPLSPLSPHPALGFPQLTVN

SEQ ID NO: 163 - protein, 318 aa, Oryza sativa subsp. indica
  misc_feature: Public GI ID no.125549238
  misc_feature: Score of 130.6 for HMM of FIGURE 3.
  misc_feature (138)..(190): Pfam Name: AP2 Pfam Description: AP2 domain
  misc_feature: Functional Homolog Of Ceres SEEDLINE ID no. ME02077 at SEQ ID NO. 79
MDFPGDAEDFALEFIREHLLGGDAPVLPPAAVPAAAAYPPTSTMFLPQQQRGYAGLTPQEYVVDSAPAADQAAFRDDQPDPAADVMIMFGGERFPAVKPSSSSSPSLTVTVPPSSFGSWAPAAVPAAAATAAAVEDFRKYRGVRQRPWGKFAAEIRDPKRRGSRVWLGTYDTPVEAARAYDRAAFRMRGAKAILNFPNEVGTRGAELWATPPPTNKRKRQPEDDTAAADDVEVIGVANKAVKTEAPTSAYSSSSLSSMSRDTTATTSSAGTSTGSSEPTSFPVVTPSSWSWDQYWDGLPPLSPLSPHPALGFPQLTVS

SEQ ID NO: 164 - DNA, 1375 bp, Triticum aestivum
  misc_feature: Ceres CLONE ID no.927860
  misc_feature: Encodes the peptide sequence at SEQ ID NO 165
acagacccacagacaaacttaccactggcaccgagtagcacttctctaccgtgccgccatctctctttctttctcacgattctcatcgactgaaaggcgaaccgtaataagcaccatggagttcgccggagaagccgacgacttcgctctcgacctcatccgcgagcacctgctcggcggcgacggtggtgtcctggcgacggctaaccatgagcagggccctttttgcgacgacgtcaccttccccgtgctgccaccttccgcggccgaaccgcaagcgtaccagcagcccatgttcttcccgcagcaggggcagcggcaggaacagacgcaaggttacatgggcctgacgcaccagtacgtgaactcatatccggctgccacggcggtgttccgtgcgccggagccggtgatgatacagttcggcggccagccgtctcctgtgagggcgctgtcgtccacgctgaccatctcggtgccgccccagggcacgttcggatgggcggggactgctgccgccgcagcgccagcgccagcaccggtcgaggacctccgcaagtaccgcggcgtccggcagcgaccgtggggcaagtacgcggcggagatccgcgacccaaagcgccggggctaccgcgagtggctcggcacctacgacacctccgtggaggccgcgcgtgcctacgaccgtgccgccttccggatgcgcggcgccaaggccattcttaactttccaaacgaggtcggcacccgcggcgccgagctgtgggcgcggccgcctgctggcccggcgtcccaggcagcaggcgcgacgaacaaacgtaagagatcacagggcgaggacgctgacgtcgaggtgaccggagtggtcataaacaaggccgtgagggccgaggcgccgtcgccgtcgtcggcccgggtgtcgtgggacacgccctcgtccttgtcgcgggggacagcgtcttcgacggtgacgtcggtggccacgacgccggagggagagtttcctccgacgccgtcaagctcgggctgggagcagtgctgggaggcgctgatgggaggcatgccgttgctgtcgcccctgtcgccacacccggcgttgggtttcccgcagcttagtgttagttaattaaaggatggttcattaagcgatagaatgtttccggtgtttgtaagaaaaacagagtaggcacccacacacagcacttgttgaacactagatttataattgaacaaagttattacatgcgtcttgctatccatgaaaatgttgtcaagctagtgtttgatctctattacatcagtgcaacaaccactgtaataactattcacccgttgttgttcatcggtttaaattggacagtcggcttttcttcac

SEQ ID NO: 165 - protein, 336 aa, Triticum aestivum
  misc_feature: Ceres CLONE ID no.927860
  misc_feature: Score of 97.5 for HMM of FIGURE 3.
  misc_feature (147)..(199): Pfam Name: AP2 Pfam Description: AP2 domain
  misc_feature: Functional Homolog Of Ceres SEEDLINE ID no. ME02077 at SEQ ID NO. 79
MEFAGEADDFALDLIREHLLGGDGGVLATANHEQGPFCDDVTFPVLPPSAAEPQAYQQPMFFPQQGQRQEQTQGYMGLTHQYVNSYPAATAVFRAPEPVMIQFGGQPSPVRALSSTLTISVPPQGTFGWAGTAAAAAPAPAPVEDLRKYRGVRQRPWGKYAAEIRDPKRRGYREWLGTYDTSVEAARAYDRAAFRMRGAKAILNFPNEVGTRGAELWARPPAGPASQAAGATNKRKRSQGEDADVEVTGVVINKAVRAEAPSPSSARVSWDTPSSLSRGTASSTVTSVATTPEGEFPPTPSSSGWEQCWEALMGGMPLLSPLSPHPALGFPQLSVS

SEQ ID NO: 166 - DNA, 823 bp, Glycine max
  misc_feature: Ceres CLONE ID no.681477
  misc_feature: Encodes the peptide sequence at SEQ ID NO 167
tcaacctcctactccttccaaaaattcttaaggatggccacagcagaagaaatttcaactttgaaactgttgcgccaatatctcttgggggatatttcagacccttttctcaccaatctcattccagtaaaacttgaagacccctcatcaggacttgatatgggttcaaacttctcagaacaaagcagcttctgcaagtttctggagtgctttgattttgaagcagaagtggtaggtctcacttctcatcataaggtccaaagctccattgcaacaagtccaccccagaatttcaattttccagaagaaccaatggtgtcaatgaaaaaggaagcaacatgttatgcaacaaggcattacagaggagtgaggagaaggccatgggggaagtttgcggcagagattcgcgaccccaaaaagaaagggagcagggtgtggcttggcacatttgacactgagattgatgctgctaaggcttatgattgtgctgccttcagaatgaggggtcataaagccgtgttgaatttccctctagaggctggaatgtctcatccagagcccaacagcagtggcaggaaaaggagaagagagtacacaacagctgccacaagttcaaggcatgttatgtcatgagaaataattcagtgtgggagaaccatgtttttcttttggcattttttgccagttacacaagttaaagcaaggttttatagttacactacagttgagcatgatgagatctgttatttaaatccttgagttatggttaagggtgaaattgaattaaacccaaaaaaaaaaaaaaaaaaaaaaaaaaaaaaaa

SEQ ID NO: 167 - protein, 199 aa, Glycine max
  misc_feature: Ceres CLONE ID no.681477
  misc_feature: Score of 96.1 for HMM of FIGURE 3.
  misc_feature (107)..(159): Pfam Name: AP2 Pfam Description: AP2 domain
  misc_feature: Functional Homolog Of Ceres SEEDLINE ID no. ME02077 at SEQ ID NO. 79
MATAEEISTLKLLRQYLLGDISDPFLTNLIPVKLEDPSSGLDMGSNFSEQSSFCKFLECFDFEAEVVGLTSHHKVQSSIATSPPQNFNFPEEPMVSMKKEATCYATRHYRGVRRRPWGKFAAEIRDPKKKGSRVWLGTFDTEIDAAKAYDCAAFRMRGHKAVLNFPLEAGMSHPEPNSSGRKRRREYTTAATSSRHVMS

SEQ ID NO: 168 - protein, 268 aa, Arabidopsis thaliana
  misc_feature: Public GI ID no.21264420
  misc_feature: Score of 52.0 for HMM of FIGURE 3.
  misc_feature (146)..(198): Pfam Name: AP2 Pfam Description: AP2 domain
  misc_feature: Functional Homolog Of Ceres SEEDLINE ID no. ME02077 at SEQ ID NO. 79
MSMTADSQSDYAFLESIRRHLLGESEPILSESTASSVTQSCVTGQSIKPVYGRNPSFSKLYPCFTESWGDLPLKENDSEDMLVYGILNDAFHGGWEPSSSSSDEDRSSFPSVKIETPESFAAVDSVPVKKEKTSPVSAAVTAAKGKHYRGVRQRPWGKFAAEIRDPAKNGARVWLGTFETAEDAALAYDRAAFRMRGSRALLNFPLRVNSGEPDPVRIKSKRSSFSSSNENGAPKKRRTVAAGGGMDKGLTVKCEVVEVARGDRLLVL

SEQ ID NO: 169 - protein, 273 aa, Oryza sativa subsp. japonica
  misc_feature: Public GI ID no.115483452
  misc_feature: Score of 113.8 for HMM of FIGURE 3.
  misc_feature (88)..(140): Pfam Name: AP2 Pfam Description: AP2 domain
  misc_feature: Functional Homolog Of Ceres SEEDLINE ID no. ME02077 at SEQ ID NO. 79
MAGFGLDQHLDLIRAHLLEDAHHHVLAPSPSPSPPGTGRVRPAPVSLPPRPPLLWAAASAAPRQQEECFELGGGYAGEGEGEEEDDFRRYRGVRQRPWGKYAAEIRDPARKGARVWLGTYDTAVEAARAYDRAAFQLRGSKAILNFPNEVAADAAVKWAPPVAPIPAAAMSAGRGKRVRSEEQYYLREVKKERLIMAPPENSSSSSSSAAAAAGDIWDELKGICSLPPLSPLSPHPHMAFPQLFVIDLAFGQILNSFVLLLLRTRDFAFDYAI

SEQ ID NO: 170 - protein, 282 aa, Mesembryanthemum crystallinum
  misc_feature: Public GI ID no.7528276
  misc_feature: Score of 52.4 for HMM of FIGURE 3.
  misc_feature (136)..(188): Pfam Name: AP2 Pfam Description: AP2 domain
  misc_feature: Functional Homolog Of Ceres SEEDLINE ID no. ME02077 at SEQ ID NO. 79
MSLIANFESDFAVLESIRRHLLEDWDPRAGAPAITTGSGPVYHRNSSFSSLYPCLTDNWGELPLKEDDSEDMVLFGVLRDAVHTGWSPQSGSESGSGSPAPVTVKPEPVDSPVSSPAPVRVAGGEAPVAAAPARGKHYRGVRRRPWGKFAAEIRDPAKNGARVWLGTFETAEDAALAYDRAAFRMRGSKALLNFPLRVNSGEPDPVRITSKRSSPERSVSSSSSESASPKRRKKEEVVVGPVAGQARPGLQQVGNVVEGMQVGVGCQVGVGTMPLGDQLLVT

SEQ ID NO: 171 - protein, 198 aa, Gossypium hirsutum
  misc_feature: Public GI ID no.37730469
  misc_feature: Score of 82.7 for HMM of FIGURE 3.
  misc_feature (69)..(121): Pfam Name: AP2 Pfam Description: AP2 domain
  misc_feature: Functional Homolog Of Ceres SEEDLINE ID no. ME02077 at SEQ ID NO. 79
MPATFEESTTLEFIRQHLLGDFATVDAFINTLDFGLSHLQPQSHQLPEIFTHGVEPAPITKEPFCEEKRHYRGVRRRPWGKFAAEIRDPNRKGIRVWLGTYDSDVDAAKAYDCAAFKMRGQKAILNFPLEAGEGSQPPAVTTGRKRRREKRVWLPESDITSPGSSEMAWEVKEEEGELDDDDRNGLSLLTRKRVIVTC

SEQ ID NO: 172 - DNA, 1444 bp, Triticum aestivum
  misc_feature: Ceres CLONE ID no.907605
  misc_feature: Encodes the peptide sequence at SEQ ID NO 173
acgcagctggacttgcattcgcacacacgcctccaaatccaacacgagctcagctcagctctctgtctgtctccctctccctctctcggccgccgacctcagctctgctccgatcgatcaaaccatggacttcggcggcgacatggacgacttctcgctccagtacatccacgagcagctgcggctccagctgctcggcgccgacccctgcggcctcctgcccctccccgcggcggacgacttcgccgcgcagccggacttcatccctgccgagttcctgccgcagccgctgcccgccttcgtcgacctgacggcgaccgactacgccgacgcggcggcgtatcgcgccgccgcggagccggtcattatacggttcggcggcgaggcgtcccccgtgtcggaccccgcccggaggccgtcgctgaccatctcgctgcccccggcctcgcacgcctgggcgcaggcgccggtgctggcggcagaggccgcggcggccgtggacgccaacgacttccggaagtaccgcggcgtgcgccagcggccgtggggcaagttcgcggcggagatccgggaccccaacaagcgcggctcgcgcgtgtggctcggcacctacgacacctccatcgaggccgcgcgagcgtacgaccgcgccgccttccgcatgcgcggcgccaaggccatcctcaacttccccaacgaggtcggctcccgcggcgccaccgacttcgtcgccccgccgccgtcgcaaaccgcgcgcgcggcgccgacgtcgcacaacaagcggaagcggcaagaggcggccgagccatgcgtcgaggtggtccgggatgccacgaaacacagcaaggccgacgcgtccgcgtcgccagcgtcgtcgctcacctcaacgccgacctcgacggtgacgtccggcaccaccaccccatcctcgtcggatgccggcggctactacgagatgtcgttcccgctggcgtcaccgactagctggacgtgggatcagctgctggccgaagggatgttcggcagcctgtcgccgcgccagcagctgggtagcttcccggaggtcaccgtgaactgagactggcggaactaccgggccgccggtacggtcgacgccaggaactgtagagcctgtgaaaagagtaagctaagcatggtgattacttaggtgtaaattaagctgccaataattagtggctcctagttctcgacggcctacgctttggactcatcttgggagcttggcctggagctgtgcactgtgtacaggattacaggagtgaggacgatagaatattaccagcgcatgcatgtcacgggtgatcaacgtaagcatcgacgacataggtagatgttgatatatacttacactgcatagatatgtatgtaatgtaaattacgtgaagatcaaagtgtgggtgcttgtctaaaaaaaaaaaaaaaa

SEQ ID NO: 173 - protein, 317 aa, Triticum aestivum
  misc_feature: Ceres CLONE ID no.907605
  misc_feature: Score of 102.2 for HMM of FIGURE 3.
  misc_feature (131)..(183): Pfam Name: AP2 Pfam Description: AP2 domain
  misc_feature: Functional Homolog Of Ceres SEEDLINE ID no. ME02077 at SEQ ID NO. 79
MDFGGDMDDFSLQYIHEQLRLQLLGADPCGLLPLPAADDFAAQPDFIPAEFLPQPLPAFVDLTATDYADAAAYRAAAEPVIIRFGGEASPVSDPARRPSLTISLPPASHAWAQAPVLAAEAAAAVDANDFRKYRGVRQRPWGKFAAEIRDPNKRGSRVWLGTYDTSIEAARAYDRAAFRMRGAKAILNFPNEVGSRGATDFVAPPPSQTARAAPTSHNKRKRQEAAEPCVEVVRDATKHSKADASASPASSLTSTPTSTVTSGTTTPSSSDAGGYYEMSFPLASPTSWTWDQLLAEGMFGSLSPRQQLGSFPEVTVN

SEQ ID NO: 174 - DNA, 1251 bp, Glycine max
  misc_feature: Ceres CLONE ID no.582684
  misc_feature: Encodes the peptide sequence at SEQ ID NO 175
gaatattcaatacctcctcttccaaaatatccacgtttcttttcccacacactatcttaaatcttaaaaacattttttttttcaaagcaattagaatttagaccacaaaaggaacaccgaagagatgtacggacagagtagtagtagcagtagttcttacgaatcggatttggcgctgttggattcgattcggcaccacttgctgggcgagtccgaatccatattcggcgccccgaatttcgggtcgggtcggagctccagtttcagcagcttggactcgtgtttgagcgacaattggggcgagcttccgtttaaggaggacgatacagaagacatggtgttgtacggcgttctccgtgacgccgttaacgtcgggtgggtcccatctctcgatgccgggtcgcccgagagcgtgtcgtcgggttttccggcggtgaagctggagccggacttgatgccggcgctgataagtccgtgtccgcctccggcggctgcggcggaggagaagaaggttgttccggcgaaggggaagcactaccgcggcgtgcggcagcggccgtgggggaagttcgcggcggagatccgcgacccggcgaagaacggagcaagggtttggctggggacgtttgagacggcggaggacgcggcgttggcgtacgaccgcgccgcctaccggatgagggggtcgagggcgttgctgaattttccgttgagggttaactccggcgagcccgatccggtgagggtgaagtcgaagcggtcgtcgtcgccagagagtgcggcggcgctgccggcgaagagaaagaaagttgtggtggtggggacggtgcaagagcaagtggggagtcaagtggcagagtgtacacgtggcgagcagttattggttagctgaggtggattctaaaactggtgttgtgtttattaaatacaataaatacaatacacttttgtaattatgtgatgtgcgtgtgtgtgtaaagcacttagctatattatagccatcatccaactcaattttggaacaaagaaaaaaaggtgaaggatgaggatagatgattttagcacatcaaatggtgagtggtgtgaccccacgggaagaaaaaaaaaaaagagggggagaaaaaaattcaaagaagttatggaatttggaagatgatgaggaatgacgggggtgaggaactgaggatatgtaatttggctttgtgaatactaccaaatttgttatttgtttgttcaaaaaaaaaaaaaaaa

SEQ ID NO: 175 - protein, 255 aa, Glycine max
  misc_feature: Ceres CLONE ID no.582684
  misc_feature: Score of 53.3 for HMM of FIGURE 3.
  misc_feature (136)..(188): Pfam Name: AP2 Pfam Description: AP2 domain
  misc_feature: Functional Homolog Of Ceres SEEDLINE ID no. ME02077 at SEQ ID NO. 79
MYGQSSSSSSSYESDLALLDSIRHHLLGESESIFGAPNFGSGRSSSFSSLDSCLSDNWGELPFKEDDTEDMVLYGVLRDAVNVGWVPSLDAGSPESVSSGFPAVKLEPDLMPALISPCPPPAAAAEEKKVVPAKGKHYRGVRQRPWGKFAAEIRDPAKNGARVWLGTFETAEDAALAYDRAAYRMRGSRALLNFPLRVNSGEPDPVRVKSKRSSSPESAAALPAKRKKVVVVGTVQEQVGSQVAECTRGEQLLVS

SEQ ID NO: 176 - protein, 201 aa, Solanum lycopersicum
  misc_feature: Public GI ID no.28274834
  misc_feature: Score of 58.7 for HMM of FIGURE 3.
  misc_feature (117)..(169): Pfam Name: AP2 Pfam Description: AP2 domain
  misc_feature: Functional Homolog Of Ceres SEEDLINE ID no. ME02077 at SEQ ID NO. 79
MTKQDEGLTLELIRQHLLEDFTTTESFIDSLNSCFSDHISSSDDISPVFTSVKTEPSTSNSLSDSPNSSYPNEPNSPISRYFNLRSDFPEFKIDSDTILSPVFDSSAGSNEDNNKKKNYRGVRRRPWGKFAAEIRDPSRKGSRIWLGTFDTDIDAARAYDCAAFKMRGRKAILNFPLDAGKSGAPANVGRKRRRENKMELV

SEQ ID NO: 177 - DNA, 1754 bp, Gossypium hirsutum
  misc_feature: Ceres CLONE ID no.1926437
  misc_feature: Encodes the peptide sequence at SEQ ID NO 178
aaaagattcagactcctaacttctcacatttcttctcttttattctttaattcattcatttttttcctaaaaaaaaacaaaacaaaaccaaccccaaattcctcaatcaattactcaagatttaacaggtttcgttatggagatgcatccgagtagcaacgagaccgatttagcaatgttggactcaattcggcgacacttactcggggagtcatcagacttccgattcgatgcttccgttgattgtaccactaccacggctccccccgtgttttgcagaagctcaagcttcaaccgcttgtacccatgtttggctgaaacctggggtgaccttcctcttaaagaaaacgattctgaagatatgctcgtttttgagttcctccgagatgctttaaccgtaggctgggcgccctccgataactcttctatcaaatatacgccgattaaaccggagccgcaggagattttagttgaggctccagctgcgaatacggttgttcccgcggtggttccgaccaaagcgaggcattacagaggagttaggcaaaggccgtgggggaagttcgcagctgagataagggacccggctaaaaatggggctcgggtttggttaggtacttttgaaacagctgaggatgcggctttggcttatgataaagcagcttataggatgcgcgggtccaaggctttgttgaatttcccattgagggtgaattccggggagcctgacccagtgagggtaacgtcaaagagagcatcacccgagccgtccaatttttcatcatccggctcagagcaggggttaccgaaaaggaggagaaaggtggctccctcagctccggttgtgggtgaagcctggttagatatgagttcagcagctgcagttgagtatgaaattggatcacgtactaacagcaatcaactattaatcagctaatggattaatgaaagaagcagggaaaatgagggtctgaaatatttgtaaacttgtgttggctttgtgcatacaaagaaattgatattatttcatggttgtttcgctaaatgagaaaattttattctttaataaaaaatgatgtaagcaatatggttgaaaatggacattccaatgcagcaagatactgtaaaaacctagttttgatgtaggaagaagcatacaatcaaaatgtagatgtaggcgttggtatctcagccatttgaagatgacaaatccagaccagcttggcgttaggcctataataaaaggtagctgctcttctttctaacatgtgtttattttaccaatattctagaacatatggcgtcaagctgaaggaacaaggacgcacgtacacgaacgttgcgcggttagaaaaggacagttgacttttgggcaaagatggaatagctttatcctctatccaaacactaattgcttttttgaccttatacattcaaactgtttgacttttcagacttttcttccgacttctaaccaccaggattctttgttcacaatgagaaaaatgttttcacattgagtttggaaaggagatatgtttgagagtataggtgggtgggaatttgattggttgttgttttctattgattttctacaactacataattcatttggatttcataaaataactttttgacgtcaacagcttgcttatgggaaaggaatactcctacatgggatttaatttagatgaaatttgatcaaagctaaaataaacatttaaatgttgaagcaaaaaaaaaaaaaaaaaaaa

SEQ ID NO: 178 - protein, 266 aa, Gossypium hirsutum
  misc_feature: Ceres CLONE ID no.1926437
  misc_feature: Score of 61.4 for HMM of FIGURE 3.
  misc_feature (130)..(182): Pfam Name: AP2 Pfam Description: AP2 domain
  misc_feature: Functional Homolog Of Ceres SEEDLINE ID no. ME02077 at SEQ ID NO. 79
MEMHPSSNETDLAMLDSIRRHLLGESSDFRFDASVDCTTTTAPPVFCRSSSFNRLYPCLAETWGDLPLKENDSEDMLVFEFLRDALTVGWAPSDNSSIKYTPIKPEPQEILVEAPAANTVVPAVVPTKARHYRGVRQRPWGKFAAEIRDPAKNGARVWLGTFETAEDAALAYDKAAYRMRGSKALLNFPLRVNSGEPDPVRVTSKRASPEPSNFSSSGSEQGLPKRRRKVAPSAPVVGEAWLDMSSAAAVEYEIGSRTNSNQLLIS

SEQ ID NO: 179 - DNA, 804 bp, Populus balsamifera subsp. trichocarpa
  misc_feature: Ceres ANNOT ID no.1447726
  misc_feature: Encodes the peptide sequence at SEQ ID NO 180
atgaacgaggttacctcattgtgcgagtttagtactctgtctcatcatcgtcagcatagaagtccaagctttagttctctcatttcttgcctaaccgagacatggggtgacttgccattaagagtggatgattctgaagatatggtcatttacaattccctcagagatgctgttcgttttggatggtcaccgttagacctaacttcacccactgccaccactgcaacagcaacaataacaagaactacaagtgtcgttaaggccgagccgggatatgagccggagccggaagccgagcccatgaaactggttcaagaagctggattgaatgaagctgctgtttctaagaaggtggtggctaaggggagacattatagaggagtgaggcaaagaccctgggggaagtttgcggctgagattagggacccggctaagaatggtgcaagagtgtggcttgggacttacgagaccgcggaggaagcgggtttggcttatgatagggcggcttatagaatgcgtggctcgaaggctttgcttaattttccacataagattgggtctaatgagccggacccagttagggtcacgactaagcgtcgagagccggagacgggtttgccggctgtggatagtggctcggctaagacgaggagaatcttggtggctaatggagatgagctggaaagggagaggggatctaaggtgtttcaggttgcacaccatataatgccacttggtgagcagttattggtcaatgggttgcggtgttggtggaggtctgtagtgactctttgttgtgaatag

SEQ ID NO: 180 - protein, 267 aa, Populus balsamifera subsp. trichocarpa
  misc_feature: Ceres ANNOT ID no.1447726
  misc_feature: Score of 47.7 for HMM of FIGURE 3.
  misc_feature (123)..(175): Pfam Name: AP2 Pfam Description: AP2 domain
  misc_feature: Functional Homolog Of Ceres SEEDLINE ID no. ME02077 at SEQ ID NO. 79
MNEVTSLCEFSTLSHHRQHRSPSFSSLISCLTETWGDLPLRVDDSEDMVIYNSLRDAVRFGWSPLDLTSPTATTATATITRTTSVVKAEPGYEPEPEAEPMKLVQEAGLNEAAVSKKVVAKGRHYRGVRQRPWGKFAAEIRDPAKNGARVWLGTYETAEEAGLAYDRAAYRMRGSKALLNFPHKIGSNEPDPVRVTTKRREPETGLPAVDSGSAKTRRILVANGDELERERGSKVFQVAHHIMPLGEQLLVNGLRCWWRSVVTLCCE

SEQ ID NO: 181 - protein, 318 aa, Oryza sativa subsp. japonica
  misc_feature: Public GI ID no.115459748
  misc_feature: Score of 55.3 for HMM of FIGURE 3.
  misc_feature (151)..(203): Pfam Name: AP2 Pfam Description: AP2 domain
  misc_feature: Functional Homolog Of Ceres SEEDLINE ID no. ME02077 at SEQ ID NO. 79
MTARSMLRNHPEASVLDTIRQHLLEEPRGGGGGEAAEASFGSLVADMWSDSLPFRDDDADDMVVFGAMRDAFSCGWLPDGVFAEVKPEPLLSPDSSSYDGSSCCFGFADVSEPVTPSDAASGAAEAAAAAAAATAEHGKEEEAAAAVARGKHYRGVRQRPWGKFAAEIRDPAKNGARVWLGTFDTAEDAALAYDRAAYRMRGSRALLNFPLRIGSEIAAAAAAAAAAAAGDKRPSPEPATSESSFSSSSSCTTTTTSSSTSSSGSPKRRKRGEAAAASMSMPLVPPPSQLNWPVQAWYPAAAPVEQVAITPRVEQLVI

SEQ ID NO: 182 - protein, 317 aa, Oryza sativa subsp. indica
  misc_feature: Public GI ID no.116310255
  misc_feature: Score of 55.3 for HMM of FIGURE 3.
  misc_feature (150)..(202): Pfam Name: AP2 Pfam Description: AP2 domain
  misc_feature: Functional Homolog Of Ceres SEEDLINE ID no. ME02077 at SEQ ID NO. 79
MARSMLRNHPEASVLDTIRQHLLEEPRGGGGGEAAEASFGSLVADMWSDSLPFRDDDADDMVVFGAMRDAFSCGWLPDGVFAEVKPEPLLSPDSSSYDGSSCCFGFADVSEPVTPSDAASGAAEAAAAAAAATAEHGKEEEAAAAVARGKHYRGVRQRPWGKFAAEIRDPAKNGARVWLGTFDTAEDAALAYDRAAYRMRGSRALLNFPLRIGSEIAAAAAAAAAAAAGDKRPSPEPATSESSFSSSSSCTTTTTSSSTSSSGSPKRRKRGEAAAASMSMPLVPPPSQLNWPVQAWYPAAAPVEQVAITPRVEQLVI

SEQ ID NO: 183 - protein, 319 aa, Oryza sativa subsp. indica
  misc_feature: Public GI ID no.125549236
  misc_feature: Score of 51.2 for HMM of FIGURE 3.
  misc_feature (152)..(204): Pfam Name: AP2 Pfam Description: AP2 domain
  misc_feature: Functional Homolog Of Ceres SEEDLINE ID no. ME02077 at SEQ ID NO. 79
MARSMLRNHPEASVLDTIRQHLLEEPRGGGGGGGEAAEASFGSLVADMWSDSLPFRDDDADDMVVFGAMRDAFSCGWLPDGVFAEVKPEPLLSPDSSSYDGSSCCFGFADVSEPVTPSDAASGAAEAAAAAAAATAEHGKEEEAAAAVARGKHYRGVRQRPWGKFAAEIRDPAKNGARVWLGTFDTAEDAALAYDRAAYRMRGSRALLNFPLRIGSEIAAAAAAAAAAAAGDKRPSPEPATSESSFSSSSSCTTTTTSSSTSSSGSPKRRKRGEAAAASMSMPLVPPPSQLNWPVQAWYPAAAPVEQVAITPRVEQLVI

SEQ ID NO: 184 - protein, 293 aa, Oryza sativa subsp. japonica
  misc_feature: Public GI ID no.125591182
  misc_feature: Score of 49.2 for HMM of FIGURE 3.
  misc_feature (126)..(178): Pfam Name: AP2 Pfam Description: AP2 domain
  misc_feature: Functional Homolog Of Ceres SEEDLINE ID no. ME02077 at SEQ ID NO. 79
MTARSMLRNHPEASVLDTIRQHLLEEPRGGGGGEAAEASFGSLVADMWSDSLPFRDDDADDMVVFGAMRDAFSCGWLPDGVFAEVKPEPLLSPDSSSYDGSGGRGGGGDGGAREGGGGAAAVARGKHYRGVRQRPWGKFAAEIRDPAKNGARVWLGTFDTAEDAALAYDRAAYRMRGSRALLNFPLRIGSEIAAAAAAAAAAAAGDKRPSPEPATSESSFSSSSSCTTTTTSSSTSSSGSPKRRKRGEAAAASMSMPLVPPPSQLNWPVQAWYPAAAPVEQVAITPRVEQLVI

SEQ ID NO: 185 - DNA, 1028 bp, Gossypium hirsutum
  misc_feature: Ceres CLONE ID no.1848864
  misc_feature: Encodes the peptide sequence at SEQ ID NO 186
cgcgcccccttttaagaatttccagtccacaaaattcaaatccttagcttttccttttccttttttttttgaaaaaatttcaaattttttattatggaagcaagcagtgaagtaacaagtgcgcttcaatatatcaagcaatatttactcggtgagttttctccagtgggattagggagtgtttcaagtgaaaatcagtggttacctcagtcgaaacctcgagtttcgagctctggatctgaatctcatttgagctccgattcgtcttttacagtatcaaattttaattgcctcgacgatgatgattatttttttcaattccctaccgatttccctggattccaatttgaatcaaaacctcaaattatcgatctgacgacacctaaatccctctcatcaaacgccggtgctttcgaatttgaagtcaaacctcagatcgctcaaatttcaacgacgaaacataaagtttcttcgaattcgagctctcagaatcggaaacggtcgctgaaaatctcgttgccgcataaaatggagcagattcagttcggtaaaacggatttagctcaggcggagccgaaagtctcaaattccgaagacaagaagcattatagaggagtccgacaaaggccgtgggggaagttcgcggccgaaatccgtgatccgacccgacgaggttctaggatgtggctaggaaccttcgaaacggccatcgaagccgcgaaggcttacgaccgagcagctttcaagctacgtggctcgaaagcgatccttaatttccctctcgaagccgggacgtcggatacacgcgccgacgactgggagaggaagcggagcagagatgacggcgaaagagaagagaggcaagtaaaggtagtgaagagagaaaaggacgatgaggtgacaagaacgagagagaacggcgaagtacctttaacgccgtccaattggaacggctttttgggttggaataacgaccaaaaagggttttttaacgtgccgctactctcgccgttaagctttccccaagt

SEQ ID NO: 186 - protein, 311 aa, Gossypium hirsutum
  misc_feature: Ceres CLONE ID no.1848864
  misc_feature: Score of 367.8 for HMM of FIGURE 3.
  misc_feature (170)..(222): Pfam Name: AP2 Pfam Description: AP2 domain
  misc_feature: Functional Homolog Of Ceres SEEDLINE ID no. ME02077 at SEQ ID NO. 79
MEASSEVTSALQYIKQYLLGEFSPVGLGSVSSENQWLPQSKPRVSSSGSESHLSSDSSFTVSNFNCLDDDDYFFQFPTDFPGFQFESKPQIIDLTTPKSLSSNAGAFEFEVKPQIAQISTTKHKVSSNSSSQNRKRSLKISLPHKMEQIQFGKTDLAQAEPKVSNSEDKKHYRGVRQRPWGKFAAEIRDPTRRGSRMWLGTFETAIEAAKAYDRAAFKLRGSKAILNFPLEAGTSDTRADDWERKRSRDDGEREERQVKVVKREKDDEVTRTRENGEVPLTPSNWNGFLGWNNDQKGFFNVPLLSPLSFPQ

SEQ ID NO: 187 - DNA, 1268 bp, Gossypium hirsutum
  misc_feature: Ceres CLONE ID no.1807978
  misc_feature: Encodes the peptide sequence at SEQ ID NO 188
aacgaacttccaaatcttctcttcttcaatttcaaatttccaatccacaaaattcaaatccttagcttctttttgaaaaattttcaattttttttttattatggaagcaagcagtgaagtaataagtgcgcttcaatatatcaagcaatatttactcggtgagttttctccagtggaattagggagtgtttcaagtggaaatcaatggttgcctgagtcgaaacctcgagtttcgacccctggatctgagtctcttttgagctccgattcgtctctgacagtatcaaattttaattgccttgacgatgatgatgatttctttcaattctctaccgatttccctggattccaatttgaatcaaaacctcaaattatcgatctcacgacacctaaatccctctcattaaacgccggtgctttcgaatttgaagtcaaacctcagatcgctcaaatttcaacgacgaaacataaagtttcttcgaattcgagctctcagaatcggaaacggtcgctgaaaatctcgttgccgcataaaatggagcagattcagttcggtaaatcggatttagctcaggcagagccaagagtctcaaattccgaagacaagaagcattatagaggagtccgacaaaggccgtgggggaagttcgcagccgaaatccgagatccgacccgacgaggttctaggatgtggttaggaaccttcgaaacggccatcgaagccgcgaaggcttacgaccgaaccgctttcaagctacgtggctcgaaagcgatccttaatttccctctcgaagccgggacgtcggatacaagcgccgacgacctggagaggaagcggagcagagatgacggcgaaagggaagagaggcaagtaaaggcagtgaagagagaaaaggacgatgaggtgacaaaaacgagagagaacggcgaaggacctttaacgccgtcaaattggaagacctttttggattgggataacgaccaaaaagggtttttttaacgtgccgttactctcgccgttaagctttccccaagttgtggttatatgaccactattttgtcagttttttaattgagtgacgtggatattttattaaattcgttttttttttcctaaaaaagttgtatatatagatagtgttattttttcagtggataattcattttcaatttacctttaaaaaattaagtatattcatgtaaaatatttattttaaaatttatgaaaaagttaatcctttattttacaaaaaaaaaaaaaaaaaaaa

SEQ ID NO: 188 - protein, 299 aa, Gossypium hirsutum
  misc_feature: Ceres CLONE ID no.1807978
  misc_feature: Score of 308.1 for HMM of FIGURE 3.
  misc_feature (170)..(222): Pfam Name: AP2 Pfam Description: AP2 domain
  misc_feature: Functional Homolog Of Ceres SEEDLINE ID no. ME02077 at SEQ ID NO. 79
MEASSEVISALQYIKQYLLGEFSPVELGSVSSGNQWLPESKPRVSTPGSESLLSSDSSLTVSNFNCLDDDDDFFQFSTDFPGFQFESKPQIIDLTTPKSLSLNAGAFEFEVKPQIAQISTTKHKVSSNSSSQNRKRSLKISLPHKMEQIQFGKSDLAQAEPRVSNSEDKKHYRGVRQRPWGKFAAEIRDPTRRGSRMWLGTFETAIEAAKAYDRTAFKLRGSKAILNFPLEAGTSDTSADDLERKRSRDDGEREERQVKAVKREKDDEVTKTRENGEGPLTPSNWKTFLDWDNDQKGFF

SEQ ID NO: 189 - DNA, 1182 bp, Gossypium hirsutum
  misc_feature: Ceres CLONE ID no.1933466
  misc_feature: Encodes the peptide sequence at SEQ ID NO 190
aggcaaaaaacctgaaaatcctttcttaatttaaacccgcaacaacaatcatttgtttctttcctttttctgttctctaaaatttctcaaacttttttcaatttgttggttatggaaacaagcagtgaaatatcaaccgcgcttcaatatatccaacactatttacttgatgaactttctcctgtgggattggggaatttttccaatgaaaatcgatggataaatgaggtaaaagcggaagtttctacctctcaacctgaatctctttactcacaaacttcgagctctggttcctctctcacagaggctaactttaattgccttgaaaatgatgatctcttcaaattttctcccaatttccgtggattccagccaaacggaagtgatgttttcgaatacgagtcgaaacctcaaattatagatctcataacacctaagtccttcccatccaatgccagttccttagaatttgaaaccaaacctaaaatcactgaactttcaacggcaaagcctcaagtttcctcgggttgtaactctaagattcgaaagccgtcgctaaaaatctcgttaccccataaggtggagtggattcaatttgacaaaccggatttaactcggcccaaaccgaataaatcaaattctgaagacaataggcactatagaggagtccgacaaaggccgtgggggaaattcgcggcggagatccgagatccgacgcgaagaggttctaggatatggttagggacctttgacacagccatcgaagccgctaaggcttacgaccgagccgcttttaagctacgtggctcaaaagccatccttaatttccctctcgaagccgggaagctggagtcaggtgccagtgacggagagaggaaacggagcagagataacagcgaaggagaagaaaaacgggcaaaggtggtgaagagagaaagcgaaaacgtgacgaaagcgagagacaacggtgatgcgcctttgacgccgtcaaattggacagcgttttgggatttggacaatgaaattaaggagatttttaacgtgccactattatcaccgttagggttttctcatgttatggttgtatgatgatgctagtgtttgaaatggagagcagtgacgtggatattttatgaaagacgtggaattctttttgggttgcaaaaaaaaaaaaaaaaaaaa

SEQ ID NO: 190 - protein, 325 aa, Gossypium hirsutum
  misc_feature: Ceres CLONE ID no.1933466
  misc_feature: Score of 368.4 for HMM of FIGURE 3.
  misc_feature (181)..(233): Pfam Name: AP2 Pfam Description: AP2 domain
  misc_feature: Functional Homolog Of Ceres SEEDLINE ID no. ME02077 at SEQ ID NO. 79
METSSEISTALQYIQHYLLDELSPVGLGNFSNENRWINEVKAEVSTSQPESLYSQTSSSGSSLTEANFNCLENDDLFKFSPNFRGFQPNGSDVFEYESKPQIIDLITPKSFPSNASSLEFETKPKITELSTAKPQVSSGCNSKIRKPSLKISLPHKVEWIQFDKPDLTRPKPNKSNSEDNRHYRGVRQRPWGKFAAEIRDPTRRGSRIWLGTFDTAIEAAKAYDRAAFKLRGSKAILNFPLEAGKLESGASDGERKRSRDNSEGEEKRAKVVKRESENVTKARDNGDAPLTPSNWTAFWDLDNEIKEIFNVPLLSPLGFSHVMVV

SEQ ID NO: 191 - DNA, 1129 bp, Gossypium hirsutum
  misc_feature: Ceres CLONE ID no.1834552
  misc_feature: Encodes the peptide sequence at SEQ ID NO 192
aagaatctccaattcaaacccacaaacaaaaaaaatccttatcttctcattttctctcttgttttcagtttttggatatggaaagtagcagtgaagtgtcgagcaggcttcaatatattgaacaatatttacttgatgaaaatcaatttcctcctgtgggattgtggagcttttcaaatgaaaatcaatggacaaattatccgaaatccgaggtttccacctctcaatctcactctctttactctcaaacttccacctctgattcctgtcttacagcatccaattttaatagccttgacgaagatgatttcttcaacttctctaccaatttcccaggtttcgagtctaaccaaagtgatgttttcgaatttgactccaaacctcaatttatccatctcaccacgcctaagcctctcgcttccgacgccactgcttgtgaattccaagtgaaatctcgatcttcttcgaattcgactcccaattctcagagtcgaaaaccttcgctgaaaatctcgttgccgcataaagtggagtggattcagttcgggaaaccggatttaaccgaggtaaagccgaagaattcaaataccgaagagagaagtaagcattacagaggagtccgacaaaggccgtggggaaagttcgcagccgagatccgagatcctaaccgaaaaggttcacgggtctggttgggaacttttgacgccgccatagaagccgcaaaggcttacgaccgagccgcctttaagttacgtggctcaaaagcgattcttaacttccctctcgaagctgggaagttggatgtaatcgccgctgacggagagaggaaacggagcagagacgacggcgctggggatgagagagaagttaaagccgtgaagagagtaaatgatgatgtgactaaagcgagagataacggcgatgcgcctttaacgccgtcaaattggacatcatttttggattgcgataacgacacgaaggggttatttaacatgccattgttgtcgccgttaggcttgcaccaagttatagtcatctagcgacgataagtcgataatgtatataaattgtttttatttgttttttctttcaattcacttattgaataaatcgatccatggtttttttt

SEQ ID NO: 192 - protein, 320 aa, Gossypium hirsutum
  misc_feature: Ceres CLONE ID no.1834552
  misc_feature: Score of 370.9 for HMM of FIGURE 3.
  misc_feature (176)..(228): Pfam Name: AP2 Pfam Description: AP2 domain
  misc_feature: Functional Homolog Of Ceres SEEDLINE ID no. ME02077 at SEQ ID NO. 79
MESSSEVSSRLQYIEQYLLDENQFPPVGLWSFSNENQWTNYPKSEVSTSQSHSLYSQTSTSDSCLTASNFNSLDEDDFFNFSTNFPGFESNQSDVFEFDSKPQFIHLTTPKPLASDATACEFQVKSRSSSNSTPNSQSRKPSLKISLPHKVEWIQFGKPDLTEVKPKNSNTEERSKHYRGVRQRPWGKFAAEIRDPNRKGSRVWLGTFDAAIEAAKAYDRAAFKLRGSKAILNFPLEAGKLDVIAADGERKRSRDDGAGDEREVKAVKRVNDDVTKARDNGDAPLTPSNWTSFLDCDNDTKGLFNMPLLSPLGLHQVIVI

SEQ ID NO: 193 - DNA, 688 bp, Glycine max
  misc_feature: Ceres CLONE ID no.1614474
  misc_feature: Encodes the peptide sequence at SEQ ID NO 194
acaacacaaccctcttctctctttaccctcttaacgcaccaagcgaagcgaaaagcgctttctaacttaagtgatggcgaacgcagctgaagtttcagccttgaaccgcatcaaactgcatcttttgggtgaactctctccactggccactcccctaaactattttgatgaatcaaaccctagcccctctgaatcttccaattcccaatcttcttctgtttctcttaaccactacttcactgacctcttcgaattcgactccaaaccccaaataatcgacctccaaactcccaaaacactaacttcagctcagaagaaacctcaattgaatcggaaaccgtcgctgctaatcgctgttccaaagaagaccgagtggatccagttcgggagcccggatccgaacccggtgatggctgcgccggagaacctgccgcagaagaatcactacagaggtgtccggcagcggccctggggcaaattcgccgccgagatccgcgacccgaacaagcgcggctctagggtttggctcggaaccttcgacaccgccgtcgaagccgccaaggcctacgaccgagccgccttcagactccgcggctccaaggccatcctcaacttccccctcgaaagtagcgccgtggcggagaccgtctccgtcgccgccgcccgaagcaacgtcgagagaaagcgc

SEQ ID NO: 194 - protein, 205 aa, Glycine max
  misc_feature: Ceres CLONE ID no.1614474
  misc_feature: Score of 255.2 for HMM of FIGURE 3.
  misc_feature (123)..(175): Pfam Name: AP2 Pfam Description: AP2 domain
  misc_feature: Functional Homolog Of Ceres SEEDLINE ID no. ME02077 at SEQ ID NO. 79
MANAAEVSALNRIKLHLLGELSPLATPLNYFDESNPSPSESSNSQSSSVSLNHYFTDLFEFDSKPQIIDLQTPKTLTSAQKKPQLNRKPSLLIAVPKKTEWIQFGSPDPNPVMAAPENLPQKNHYRGVRQRPWGKFAAEIRDPNKRGSRVWLGTFDTAVEAAKAYDRAAFRLRGSKAILNFPLESSAVAETVSVAAARSNVERKR

SEQ ID NO: 195 - protein, 278 aa, Vitis aestivalis
  misc_feature: Public GI ID no.40060531
  misc_feature: Score of 274.1 for HMM of FIGURE 3.
  misc_feature (118)..(170): Pfam Name: AP2 Pfam Description: AP2 domain
  misc_feature: Functional Homolog Of Ceres SEEDLINE ID no. ME02077 at SEQ ID NO. 79
MGEEASSLQLIHHLLLSDFDSMETFVSHVSHSLRSSASDSSVSTDDIIQVSEYPKLHEDESNAFLFDYSTSSPSAVFQFQTESPKPSRLSHRRPPVSISLPPPPISHTSSSLDSGERRHYRGVRRRPWGKFAAEIRDPNRRGSRVWLGTFETAIEAARAYDRAAFKMRGSKAVLNFPLEAGNWSDSDPPATSIRKRERESESEEREQPEIKVLKQEEASPDSDSPVVAEAANVLEASPLTPSSWRTVWEERDMDGAFHMPPLTPLSPHPWIGYSRLIS

SEQ ID NO: 196 - DNA, 864 bp, Populus balsamifera subsp. trichocarpa
  misc_feature: Ceres ANNOT ID no.1438401
  misc_feature: Encodes the peptide sequence at SEQ ID NO 197
atggcatcttttgatcatgaagcttcaacattggaactcattaggcaacacctcttgactgactttgcttccatggacagcttcatctccaatcttgatgatctttgcagcacttccaccaccagtactactgatgactactacatcaagtctgaatcaacagaatttgatccctttgatcaaccacaattcaagctgcaaactcaatctagcattgaatccaagcctcaatattcctcaccaaagtcttcaacttctctaagccagagaaaaccatccatgatcaaggacatagccatacctccaccagcaaccttgaacatgaacccacaagtagcacagccagtggtgaacaagacagatttgtctagtgaacaagataggcattacaggggtgttaggcgtaggccttggggaaaatatgcagcggagatccgtgaccctaacaaaaaaggagctcgtgtatggcttggaacatttgatactgccattgaagctgccaaagcttatgatagcgctgctttcaggttacgaggaagcaaagcgatcttgaatttccctcttgaagctggcaagtcgaattctcaacaacctgaacaattcttggaaacttcttgcaagaaaagaaagtttgaaggaataaagagtagcgtggaaggtactaattctatcactaataaggtggtgaagagggagacttcttcaccggaaagtgaggtcaaagcggttgcttcgggtccattaacgccgtcaagttggaaggggttttgggatggtgaaaccatggggatatttagtgtgccaccattatcgccgttatctccacatccttcatttggatattcaaggctcatggttgtttga

SEQ ID NO: 197 - protein, 287 aa, Populus balsamifera subsp. trichocarpa
  misc_feature: Ceres ANNOT ID no.1438401
  misc_feature: Score of 320.6 for HMM of FIGURE 3.
  misc_feature (128)..(180): Pfam Name: AP2 Pfam Description: AP2 domain
  misc_feature: Functional Homolog Of Ceres SEEDLINE ID no. ME02077 at SEQ ID NO. 79
MASFDHEASTLELIRQHLLTDFASMDSFISNLDDLCSTSTTSTTDDYYIKSESTEFDPFDQPQFKLQTQSSIESKPQYSSPKSSTSLSQRKPSMIKDIAIPPPATLNMNPQVAQPVVNKTDLSSEQDRHYRGVRRRPWGKYAAEIRDPNKKGARVWLGTFDTAIEAAKAYDSAAFRLRGSKAILNFPLEAGKSNSQQPEQFLETSCKKRKFEGIKSSVEGTNSITNKVVKRETSSPESEVKAVASGPLTPSSWKGFWDGETMGIFSVPPLSPLSPHPSFGYSRLMVV

SEQ ID NO: 198 - DNA, 881 bp, Gossypium hirsutum
  misc_feature: Ceres CLONE ID no.1847074
  misc_feature: Encodes the peptide sequence at SEQ ID NO 199
aaaatcaactctttttcctacaaatgacatcttctgaagaaacattagccttggaactcattcgaaaacatctttgcttccatggattcttttcttgccagtcttcatcatatagtggaaaccccacaattctctcaacttcatagccccaatcagatgaaacattctactctaagccaacgccgtcctgctataaacgtcgccattcccgcaccgaaagtgaacgtaagcgacgagcagaggcattacaggggtgttaggagacgaccttggggtaaatatgcagctgaaattagagaccccaacagaaaaggtgcgagggtttggctgggaacctttgataccgccattgaagctgctaaagcttatgatgaagctgcgtttaagcttcgtggaagtaaagctatattgaattttcctcttgaagctggaaaatcaagttcaacccactctgaattaagtaaagcttgtataaaaagaaaaagagaggaagaagaagaagaagggagagtggagagtaaagtagtgaaaagagaggagaagggaagtgtgacgccgggagtatgtttaacgccgtcaaattggacggggttttgggatagtgaagatatgaagggaatattcagtatccctcccttatctccgttatctccgtttgggtattccgggcttgcggttatgtgaaagtgaaacgcttttgatgggtttttggacgccgttaactaaaatcaggaatggttggctgacgtggctagttcaagttgtatcattagtgtacattgccttttgttttatttataacattctttttcttcttttatttggttttttagtgaataccaaatttctttcttgaatttcaaaaaaaaaaaaaaaaaaaa

SEQ ID NO: 199 - protein, 200 aa, Gossypium hirsutum
  misc_feature: Ceres CLONE ID no.1847074
  misc_feature: Score of 211.9 for HMM of FIGURE 3.
  misc_feature (54)..(106): Pfam Name: AP2 Pfam Description: AP2 domain
  misc_feature: Functional Homolog Of Ceres SEEDLINE ID no. ME02077 at SEQ ID NO. 79
MDSFLASLHHIVETPQFSQLHSPNQMKHSTLSQRRPAINVAIPAPKVNVSDEQRHYRGVRRRPWGKYAAEIRDPNRKGARVWLGTFDTAIEAAKAYDEAAFKLRGSKAILNFPLEAGKSSSTHSELSKACIKRKREEEEEEGRVESKVVKREEKGSVTPGVCLTPSNWTGFWDSEDMKGIFSIPPLSPLSPFGYSGLAVM

SEQ ID NO: 200 - DNA, 954 bp, Gossypium hirsutum
  misc_feature: Ceres CLONE ID no.1855621
  misc_feature: Encodes the peptide sequence at SEQ ID NO 201
aaaatcaactctttttcctacaaatgacatcttctgaagaaacattagccttggaactcattcgaaaacatcttcttactgactttgcttccatggattcttttcttgccagtcttcatcatatagtggaaaccccacaattctctcaacttcatagccccaatcagatgaaacattctactctaagccaacgccgtcctgctataaacgtcgccattcccgcaccgaaagtgaacgtaagcgacgagcagaggcattacaggggtgttaggagacgaccttggggtaaatatgcagctgaaattagagaccccaacagaaaaggtgcgagggtttggctgggaacctttgataccgccattgaagctgctaaagcttatgatgaagctgcgtttaagcttcgtggaagtaaagctatattgaattttcctcttgaagctggaaaatcaagttcaacccactctgaattaagtaaagcttgtataaaaagaaaaagagaggaagaagaagaagaagggagagtggagagtaaagtagtgaaaagagaggagaagggaagtgtgacgccgggagtatgtttaacgccgtcaaattggacggggttttgggatagtgaagatatgaagggaatattcagtatccctcccttatctccgttatctccgtttgggtattccgggcttgcggttatgtgaaagtgaaacgcttttgatgggtttttggacgccgttaactaaaatcaggaatggttggctgacgtggctagttcaagttgtatcattagtgtacattgccttttgttttatttataacattctttttcttcttttatttggttttttagtgaataccaaatttctttcttgaattttatatcaatatcatttttttcataatacatgaacctactacataataaatctaaatttatgttaaaaaaaaaaaaaaaaaaaa

SEQ ID NO: 201 - protein, 223 aa, Gossypium hirsutum
  misc_feature: Ceres CLONE ID no.1855621
  misc_feature: Score of 270.7 for HMM of FIGURE 3.
  misc_feature (77)..(129): Pfam Name: AP2 Pfam Description: AP2 domain
  misc_feature: Functional Homolog Of Ceres SEEDLINE ID no. ME02077 at SEQ ID NO. 79
MTSSEETLALELIRKHLLTDFASMDSFLASLHHIVETPQFSQLHSPNQMKHSTLSQRRPAINVAIPAPKVNVSDEQRHYRGVRRRPWGKYAAEIRDPNRKGARVWLGTFDTAIEAAKAYDEAAFKLRGSKAILNFPLEAGKSSSTHSELSKACIKRKREEEEEEGRVESKVVKREEKGSVTPGVCLTPSNWTGFWDSEDMKGIFSIPPLSPLSPFGYSGLAVM

SEQ ID NO: 202 - DNA, 867 bp, Populus balsamifera subsp. trichocarpa
  misc_feature: Ceres ANNOT ID no.1484557
  misc_feature: Encodes the peptide sequence at SEQ ID NO 203
atggcatcttttgatgaagcttcagctttggaactcattagggagcacctcttgactgactttgcttccatggacagcttaatcaccaatcttgatgatctttgcagtacttccagctcctgtattactactgactacatcaagactgaatcaacagaattcgacccctttaatcaatcagagcacccacaacctaagctgcagagtcaatctagcatcgaatccaagccccaatcctcaccaaagtctccaagcactctaagccagagaaaaccatccatgatcaagaacatcgcaattcctccaccagcaaccttgaacatgaccccacaagtagtacagccagtggtgatcaaggcagatgtttcaagtgaacaagaaaggcattacaggggcgttaggcgtaggccatggggcaaatatgcagctgagatccgtgaccctaacaaaaaaggagctcgtgtatggcttggaacatttgatacagccattgaagctgcaaaagcttatgacagtgctgctttcaggctacgtggaagtaaagcaatcttgaatttccctcttgaagctggaaagtctaattctcagcaacctgaacaattcttggaaacttcaagcaagaaaagaaagattgaagaaatagagagtagtatggaaagtactggttctgtgatcactaataaggtggcgaagagggaaagttcttcgccggaaactgaggtcaaagcagcggctacggaaccattaacgccgtcaagttggaaggggttctgggatggtgaagtcatggggatatttaatgtgccaccattgtcaccgttatctccccatccttcatttgggtattcaaggctgatggttgtttga

SEQ ID NO: 203 - protein, 288 aa, Populus balsamifera subsp. trichocarpa
  misc_feature: Ceres ANNOT ID no.1484557
  misc_feature: Score of 328.6 for HMM of FIGURE 3.
  misc_feature (128)..(180): Pfam Name: AP2 Pfam Description: AP2 domain
  misc_feature: Functional Homolog Of Ceres SEEDLINE ID no. ME02077 at SEQ ID NO. 79
MASFDEASALELIREHLLTDFASMDSLITNLDDLCSTSSSCITTDYIKTESTEFDPFNQSEHPQPKLQSQSSIESKPQSSPKSPSTLSQRKPSMIKNIAIPPPATLNMTPQVVQPVVIKADVSSEQERHYRGVRRRPWGKYAAEIRDPNKKGARVWLGTFDTAIEAAKAYDSAAFRLRGSKAILNFPLEAGKSNSQQPEQFLETSSKKRKIEEIESSMESTGSVITNKVAKRESSSPETEVKAAATEPLTPSSWKGFWDGEVMGIFNVPPLSPLSPHPSFGYSRLMVV

SEQ ID NO: 204 - DNA, 1002 bp, Gossypium hirsutum
  misc_feature: Ceres CLONE ID no.1846882
  misc_feature: Encodes the peptide sequence at SEQ ID NO 205
atatacgaacccaccacacactctctgttccactcaaatccatcaccttctcctccaacttcacttccattttattaattttagcttcccaaaaatggcttctttcggagaagcaccatctgatttagaactcataaagcaacacctctttaatgattttccttcaatggaaacctttctttcacctcctccaacaccacagtttcataaacaatccaccctaagccaacgtcgtccttctattaacgtcacaattccaccatcgaaagttaacataacctccgcagccacgaaagccatcgaggaacatgacgagaaaaggcattacaggggtgtaagaagacgaccatggggtaagttcgcagccgaaattagagaccctaatcgaaaaggttctagaatttggctcggaactttcgaaaccgccatcgaagccgctaaagcttatgatagagctgcttttaagctacgtggaagtaaagccattttgaatttccctctcgaaatcggaaactcgaactcaactgaattccaaccctcgaataaaagaaaaagagaagaagaagaagaagagaggaggaaagtggtgaaaaaggaggaggtaacggaaaacgtaacgacaacggggatatgtttaacgccgtcaaattggaaagggttttgggatagtgaagatatgaagggaatatttagtattcctccattatcacctttatctccgtttggttattccatttcaggactcgccgttatgtaatgatgtggtgtcgtttactaaataaggaaaggttggttgacgtgacggcttaatcatctactataaacggaaaagttaacggccgtcaagaaatagattaacgaagaggtgtgtgttttggattagtatgagtattattagcatatataagctagagaatgccaaagcctaaggttttttatttaattaaaattgtatttgtttctttatttgtttatttaatgaaattattattttatttttac

SEQ ID NO: 205 - protein, 220 aa, Gossypium hirsutum
  misc_feature: Ceres CLONE ID no.1846882
  misc_feature: Score of 261.6 for HMM of FIGURE 3.
  misc_feature (76)..(128): Pfam Name: AP2 Pfam Description: AP2 domain
  misc_feature: Functional Homolog Of Ceres SEEDLINE ID no. ME02077 at SEQ ID NO. 79
MASFGEAPSDLELIKQHLFNDFPSMETFLSPPPTPQFHKQSTLSQRRPSINVTIPPSKVNITSAATKAIEEHDEKRHYRGVRRRPWGKFAAEIRDPNRKGSRIWLGTFETAIEAAKAYDRAAFKLRGSKAILNFPLEIGNSNSTEFQPSNKRKREEEEEERRKVVKKEEVTENVTTTGICLTPSNWKGFWDSEDMKGIFSIPPLSPLSPFGYSISGLAVM

SEQ ID NO: 206 - DNA, 670 bp, Gossypium hirsutum
  misc_feature: Ceres CLONE ID no.1854513
  misc_feature: Encodes the peptide sequence at SEQ ID NO 207
actcaaatccatcaccttctcctccaacttcacttccattttattaattttagcttcccaagaatggcttctttcggagaaacatcatctgctttagaactcataaatcaacaccttaatgattttgcttcaatggaaacctttctttcacctcctccaacaccccagtttcataaacaatccaccctaagccaacgtcgaccttctattaacgtcacaattccaccatcgaaagttgaaataacctccaccgccacgaaagccatcgaggaacatgacgagaaaaggcattacaggggtgtaagaagacgaccatggggaaagttcgcagccgaaattagagaccctaatcgaaaaggttctagaatttggctcggaactttcgaaaccgctatcgaagccgctaaagcttatgatagagctgcttttaagctacgtggaagtaaagcaattttgaatttccctctcgaaatcggaaactcgaactcaactgaatcccaaccctcgaataaaagaaaaagagaagaagaagaacaagagaggaaagtagtgaaaaaggaagagataacggaaaacgtaacgacgacgggagtatgtttgacgccgtcaaattggagagggttttgggatagtgaagatatgaagggaatatttagtattcctccattat

SEQ ID NO: 207 - protein, 202 aa, Gossypium hirsutum
  misc_feature: Ceres CLONE ID no.1854513
  misc_feature: Score of 223.1 for HMM of FIGURE 3.
  misc_feature (75)..(127): Pfam Name: AP2 Pfam Description: AP2 domain
  misc_feature: Functional Homolog Of Ceres SEEDLINE ID no. ME02077 at SEQ ID NO. 79
MASFGETSSALELINQHLNDFASMETFLSPPPTPQFHKQSTLSQRRPSINVTIPPSKVEITSTATKAIEEHDEKRHYRGVRRRPWGKFAAEIRDPNRKGSRIWLGTFETAIEAAKAYDRAAFKLRGSKAILNFPLEIGNSNSTESQPSNKRKREEEEQERKVVKKEEITENVTTTGVCLTPSNWRGFWDSEDMKGIFSIPPL

SEQ ID NO: 208 - protein, 221 aa, Arabidopsis thaliana
  misc_feature: Public GI ID no.18423250
  misc_feature: Score of 215.3 for HMM of FIGURE 3.
  misc_feature (70)..(122): Pfam Name: AP2 Pfam Description: AP2 domain
  misc_feature: Functional Homolog Of Ceres SEEDLINE ID no. ME02077 at SEQ ID NO. 79
MASSHQQQQEQDQSALDLITQHLLTDFPSLDTFASTIHHCTTSTLSQRKPPLATIAVPTTAPVVQENDQRHYRGVRRRPWGKYAAEIRDPNKKGVRVWLGTFDTAMEAARGYDKAAFKLRGSKAILNFPLEAGKHEDLGDNKKTISLKAKRKRQVTEDESQLISRKAVKREEAQVQADACPLTPSSWKGFWDGADSKDMGIFSVPLLSPCPSLGHSQLVVT

SEQ ID NO: 209 - protein, 221 aa, Arabidopsis thaliana
  misc_feature: Public GI ID no.21592411
  misc_feature: Score of 215.3 for HMM of FIGURE 3.
  misc_feature (70)..(122): Pfam Name: AP2 Pfam Description: AP2 domain
  misc_feature: Functional Homolog Of Ceres SEEDLINE ID no. ME02077 at SEQ ID NO. 79
MASSHQQQQEQDQSALDLITQHLLTDFPSLDTFASTIHHCTTSTLSQRKPPLATIAVPTTAPVVQENDQRHYRGVRRRPWGKYAAEIRDPNKKGVRVWLGTFDTAMEAARGYDKAAFKLRGSKAILNFPLEAGKHEDLGDNKKTISLKAKRKRQVTEDESQLISHKAVKREEAQVQADACPLTPSSWKGFWDGADSKDMGIFSVPLLSPCPSLGHSQLVVT

SEQ ID NO: 210 - DNA, 833 bp, Arabidopsis thaliana
  misc_feature: Ceres CLONE ID no.2347
  misc_feature: Encodes the peptide sequence at SEQ ID NO 211
ataatcaaaaccacaaagaagactccaacataattcatcatctatggcttcttcacatcaacaacagcaagaacaagaccagtcagctttagatctcataacccaacaccttcttactgatttcccttccttagacacctttgcctccaccatccaccactgcaccacctcaactctaagccaacgcaaaccacctcttgccactatagcagttcctactactgcaccggtggttcaagagaatgatcaaaggcattacagaggcgtcaggagaagaccatggggtaagtatgcggctgagatcagagacccaaacaagaaaggtgttcgtgtctggttaggcacttttgacacagccatggaagctgcaagaggttatgacaaggcagcttttaaactacgaggaagcaaagctattcttaacttcccacttgaagcaggaaagcatgaggacttgggagacaacaagaagactatttctttaaaagcaaagaggaagagacaggtgacggaggatgaaagccagctgatcagccataaagctgttaagagggaagaagctcaggttcaggctgatgcttgtccattaacgccatcaagttggaaggggttttgggacggagcagacagtaaagacatgggaatattttccgtgcctctgttatctccttgtccatctcttggacactctcaactcgtagttacttaagcttcagagggtcaaactggaaaaaatcaacattggattgttttcaaagcttctagattagctgattgtaaaaaaatgttttactatattcattcattcttcttaaatgcaattctttctaccc

SEQ ID NO: 211 - protein, 221 aa, Arabidopsis thaliana; identical to SEQ ID NO: 209
  misc_feature: Ceres CLONE ID no.2347
  misc_feature: Score of 215.3 for HMM of FIGURE 3.
  misc_feature (70)..(122): Pfam Name: AP2 Pfam Description: AP2 domain
  misc_feature: Functional Homolog Of Ceres SEEDLINE ID no. ME02077 at SEQ ID NO. 79

SEQ ID NO: 212 - DNA, 893 bp, Brassica napus
  misc_feature: Ceres CLONE ID no.1080500
  misc_feature: Encodes the peptide sequence at SEQ ID NO 213
aacacaatcaaaaccataaaccaacgactccaagtctctcatatatggcatcttcacaagaccaatcagctttggacctcatcactcaacacctccttaccgatttcccttccttagagactttcgtctctagcatccatcagagcaccacctccactcttagccaacgcaagccatctcttgccaccatttcagttcctactactgcaccggtggttcaagaggatgatcataggcattacaggggcgtgaggcgtaggccgtggggtaagtatgcggctgagatcagagacccaaacaagaaaggcgttcgtgtctggttaggtacttttgacacggccgtggaggctgcaagaggttacgacagggctgcttttaaactaagaggaagcaaagccattcttaacttcccactagaagcaggcaagcaccaggactctggagacaacaagaacaagaagactgtggctttgaaagctaagaggaagagaccagaaacagaggatgaaaaccatgagagaaacctgatcagtcataaagctgtgaaaagggaagagacggaagctcagggtgaggcttgtccgttaacaccatcaagttggatggggttttgggacgcagtagacggtatagggatgggactattctctgtgcctcctttatctccttacccatcgctaggacattctcaactcggagttaagtaagcttatggatgtaggtgacatccgcaactttggattatatatcatcggcaagcgaacacacaaacaagacaataattatcttaaggattgtattaaagattcctcacggagtgaattagtttgtagattggttgattgtaaatggtttgttatattcattcgttcttctcaaaaaaaaaaaaaaaa

SEQ ID NO: 213 - protein, 220 aa, Brassica napus
  misc_feature: Ceres CLONE ID no.1080500
  misc_feature: Score of 240.3 for HMM of FIGURE 3.
  misc_feature (64)..(116): Pfam Name: AP2 Pfam Description: AP2 domain
  misc_feature: Functional Homolog Of Ceres SEEDLINE ID no. ME02077 at SEQ ID NO. 79
MASSQDQSALDLITQHLLTDFPSLETFVSSIHQSTTSTLSQRKPSLATISVPTTAPVVQEDDHRHYRGVRRRPWGKYAAEIRDPNKKGVRVWLGTFDTAVEAARGYDRAAFKLRGSKAILNFPLEAGKHQDSGDNKNKKTVALKAKRKRPETEDENHERNLISHKAVKREETEAQGEACPLTPSSWMGFWDAVDGIGMGLFSVPPLSPYPSLGHSQLGVK

SEQ ID NO: 214 - DNA, 957 bp, Gossypium hirsutum
  misc_feature: Ceres CLONE ID no.1849534
  misc_feature: Encodes the peptide sequence at SEQ ID NO 215
ctcaaatccatcagttttccctttttttagtctccaacttccatttctcttatccggattgatatcataaataccaaaatggcatgttctgatgaaacatcagcccagttagaacttatcaggcaacatctctttactgattttgcttccatggaaactccaccacccttctatcaactctcaaattccgagtcatctcatgtttatagcccgacccggttaaaacaatcgagtctcagccaacgtcgtccttctattaacgttatgatcccacccacaagttttaacataagcccaaacccggttccagattcggctgcggtggcggttgaatcatacgagaaaagtcattatagaggtgttagaagacgaccatgggggaagtttgcggctgaaattagagaccctaacaagaaaggggcaagggtttggcttggaacatttgacaccgccatagaagcggcaaaagcatatgatagagctgcctttaagctacgcggtagcaaagctatactgaattttcctcatgaagcaggaaaatcaaatttctcagagtcaggaaaaaggaggagaagtgtagaggaaggagaaggagaaaagagagtgagcctgctggagtgcaaagcagggagaagagaggaggaggtaacggtggcggaatgtggaacgccgtcgaatcagacggggatcggggataatgaagatataaatgaaatattcggtggcccactcttatcacccttatcatcgtttccatggtttgggtattccaggcttgaggttatgtaaaagcttagcaaggaatgtggctgtgtttactttttttaagtgtttggtaattagtagggatgggatgcctaaagcctaagcattttcagatcaaattgcatttgttctttcttctgtttactttaataaataaaattgtcttctcctcaaaaaaaaaaaaaaaaaaaa

SEQ ID NO: 215 - protein, 236 aa, Gossypium hirsutum
  misc_feature: Ceres CLONE ID no.1849534
  misc_feature: Score of 213.6 for HMM of FIGURE 3.
  misc_feature (90)..(142): Pfam Name: AP2 Pfam Description: AP2 domain
  misc_feature: Functional Homolog Of Ceres SEEDLINE ID no. ME02077 at SEQ ID NO. 79
MACSDETSAQLELIRQHLFTDFASMETPPPFYQLSNSESSHVYSPTRLKQSSLSQRRPSINVMIPPTSFNISPNPVPDSAAVAVESYEKSHYRGVRRRPWGKFAAEIRDPNKKGARVWLGTFDTAIEAAKAYDRAAFKLRGSKAILNFPHEAGKSNFSESGKRRRSVEEGEGEKRVSLLECKAGRREEEVTVAECGTPSNQTGIGDNEDINEIFGGPLLSPLSSFPWFGYSRLEVM

SEQ ID NO: 216 - DNA, 865 bp, Brassica napus
  misc_feature: Ceres CLONE ID no.965028
  misc_feature: Encodes the peptide sequence at SEQ ID NO 217
gcacaacacaatcaaaaccataaaccaacgactccaagtctcatatatggcttcttcacaagaccaatcagctttggacctcatcactcaacacctccttaccgatttcccttcattggagactttcgtctctagcatccatcagagcaccacctccactcttagccaacgcaagccatctcttgccaccatttcagttcctactactgcaccggtggttcaagaggatgatcataggcattacaggggcgtgaggcgtaggccgtggggtaagtatgcggctgagatcagagacccaaacaagaaaggcgttcgtgtctggttaggtacttttgacacggccgtggaggctgcaagaggttacgacagggctgcttttaaactaagaggaagcaaagccattcttaacttcccactagaagcaggcaagcacgaggacaacaacactgtggctttgaaatctaagaggaagagaccagaaacacaggatgaaaaccatggcagaaacctgatcagccataaagctgtgataagggaaragacggaagctcagggtgaggcttgtccgttaacaccatcaagttggatggggttttgggatggagtagacggtatagggacgggactattctctgtgcctcctttatctccttacccatcgctaggacattctcaactcggagttaagtaagcttatggatgtaggtgacatccgcaactttggattttatatcatcggcaagcgaacacacaaagaatcttaaagattgtattaaagattcctcatggagtgaattcgtttcttgatttgttgattgtaaatggtttgttatattcattcgttcttctcagtgcaattatctct

SEQ ID NO: 217 - protein, 214 aa, Brassica napus
  misc_feature: Ceres CLONE ID no.965028
  misc_feature: Score of 222.6 for HMM of FIGURE 3.
  misc_feature (64)..(116): Pfam Name: AP2 Pfam Description: AP2 domain
  misc_feature: Functional Homolog Of Ceres SEEDLINE ID no. ME02077 at SEQ ID NO. 79
  misc_feature (165)..(165): Xaa is any aa, unknown, or other
MASSQDQSALDLITQHLLTDFPSLETFVSSIHQSTTSTLSQRKPSLATISVPTTAPVVQEDDHRHYRGVRRRPWGKYAAEIRDPNKKGVRVWLGTFDTAVEAARGYDRAAFKLRGSKAILNFPLEAGKHEDNNTVALKSKRKRPETQDENHGRNLISHKAVIREXTEAQGEACPLTPSSWMGFWDGVDGIGTGLFSVPPLSPYPSLGHSQLGVK

SEQ ID NO: 218 - DNA, 1353 bp, Glycine max
  misc_feature: Ceres CLONE ID no.464504
  misc_feature: Encodes the peptide sequence at SEQ ID NO 219
gactcaaccaattccaaattctcaactttcctaactttagcaaccatctaagaagttcagtcccttaattatctctcaccttgaattagaaaagcattcaaagctttgaacccaatttcactgtttgcacctcaaacatcttagaagtcccaattgagtctcaattccacaaccaaaaatgcaaagttcaatttcacaatctgatatttttatcactgattaccttgtaccccaagaagttccatttcaatttcaatttcaagatatgagcaagaatgacaacaacatgccaatgaaccataccaataataaccttcaaatgcctcaaatcacatctttctccaagcctccaaggtcctcatcaaatctaagcaaccgcaaaccctccttgaaaaacatcacaatcccttccataacctctggtcttgcaacagctatgtcacaaacaacagcaacaacaacaacaatagctacaaccatgtataacaacaaccaagtttcttcttcttctttttcttcagatgaaaccaacaataccaaagacgacaagcactatagaggggttagaagaaggccatgggggaagtatgctgcagaaatccgtgaccctaatagaaaaggttcaagggtgtggcttggaacctttgacacagccatagaagctgctaaggcttatgacaaagctgctttcaagatgagagggagcaaagccatattgaacttccctttggagattggatcagatcagtctaaagaagagtcatcatcatcatcatcatcagtttcaagcagcagcatcgtcatcaaggttggtgtgaagagagaaagagaggaagagagtgaaaggaagaacaactatgagaaaagtgagtttaacaacaatagtaatagtaataagcatgtgaagaaagaagagtgccctttgactccatcatgttggaaaggcttttgggacactgatgttatgggaacaatctttagtgtgcctcctttgtcaccactatctccactaatggttgtttgagattttgtggaacttttgctctttcaatgatgttttgaggtaaccaaactaaggggagagagagagatgatgctggtgattgtcctctctgatttaggttgctaatttgcctaaatcaaaatggtagtactaattaatctactaatagattaatttgcaagtgaatatatatatggatttgtataatgtaaatataggatagymctatgaagcaagatctttttgtttgttgaaaaaaaaaacaaaaaacccatgcttatcttcttcctttaggtaaaaaaatgtactgtacttgaagcaatattgaaatttgtttattcgtttattgg

SEQ ID NO: 219 - protein, 281 aa, Glycine max
  misc_feature: Ceres CLONE ID no.464504
  misc_feature: Score of 162.4 for HMM of FIGURE 3.
  misc_feature (124)..(176): Pfam Name: AP2 Pfam Description: AP2 domain
  misc_feature: Functional Homolog Of Ceres SEEDLINE ID no. ME02077 at SEQ ID NO. 79
MQSSISQSDIFITDYLVPQEVPFQFQFQDMSKNDNNMPMNHTNNNLQMPQITSFSKPPRSSSNLSNRKPSLKNITIPSITSGLATAMSQTTATTTTIATTMYNNNQVSSSSFSSDETNNTKDDKHYRGVRRRPWGKYAAEIRDPNRKGSRVWLGTFDTAIEAAKAYDKAAFKMRGSKAILNFPLEIGSDQSKEESSSSSSSVSSSSIVIKVGVKREREEESERKNNYEKSEFNNNSNSNKHVKKEECPLTPSCWKGFWDTDVMGTIFSVPPLSPLSPLMVV

SEQ ID NO: 220 - protein, 164 aa, Solanum lycopersicum
  misc_feature: Public GI ID no.12231294
  misc_feature: Score of 134.2 for HMM of FIGURE 3.
  misc_feature (8)..(60): Pfam Name: AP2 Pfam Description: AP2 domain
  misc_feature: Functional Homolog Of Ceres SEEDLINE ID no. ME02077 at SEQ ID NO. 79
MVENSEKKRYRGVRQRPWGKFAAEIRDPTRKGTRVWLGTFDTAMDAAMAYDRAAFRLRGSKAILNFPLEVSNFKQENHEIEKNVVNLNSNTNSCGKRVRREMENDDGIVMKKEVKREQMVATPLTPSNWSSIWDCGNGKGIFEVPPLSPLSPHSNFGYSQLLVS

SEQ ID NO: 221 - protein, 241 aa, Arabidopsis thaliana
  misc_feature: Public GI ID no.15240297
  misc_feature: Score of 208.4 for HMM of FIGURE 3.
  misc_feature (86)..(138): Pfam Name: AP2 Pfam Description: AP2 domain
  misc_feature: Functional Homolog Of Ceres SEEDLINE ID no. ME02077 at SEQ ID NO. 79
MATKQEALAIDFISQHLLTDFVSMETDHPSLFTNQLHNFHSETGPRTITNQSPKPNSTLNQRKPPLPNLSVSRTVSTKTEKEEEERHYRGVRRRPWGKYAAEIRDPNKKGCRIWLGTYDTAVEAGRAYDQAAFQLRGRKAILNFPLDVRVTSETCSGEGVIGLGKRKRDKGSPPEEEKAARVKVEEEESNTSETTEAEVEPVVPLTPSSWMGFWDVGAGDGIFSIPPLSPTSPNFSVISVT

SEQ ID NO: 222 - protein, 241 aa, Arabidopsis thaliana
  misc_feature: Public GI ID no.13430474
  misc_feature: Score of 203.6 for HMM of FIGURE 3.
  misc_feature (86)..(138): Pfam Name: AP2 Pfam Description: AP2 domain
  misc_feature: Functional Homolog Of Ceres SEEDLINE ID no. ME02077 at SEQ ID NO. 79
MATKQEALAIDFISQHLLTDFVSMETDHPSLFTNQLHNFHSETGPRTITNQSPKPNSTLNQRKPPLPNLSVSRTVSTKTEKEEEERHYRGVRRRPWGKYAAEIRDPNKKGCRIWLGTYDTAVEAGRAYDQAAFQLRGRKAILNFPLDVRVTSETCSGEGVIGLGKRKRDKGSPPEEEKAARVKVEEEESNTSETTEAEVEPVVPLTSSSWMGFWDVGAGDGIFSIPPLSPTSPNFSVISVT

SEQ ID NO: 223 - protein, 241 aa, Arabidopsis thaliana
  misc_feature: Public GI ID no.21617964
  misc_feature: Score of 209.2 for HMM of FIGURE 3.
  misc_feature (86)..(138): Pfam Name: AP2 Pfam Description: AP2 domain
  misc_feature: Functional Homolog Of Ceres SEEDLINE ID no. ME02077 at SEQ ID NO. 79
MATKQEALAIDFISQHLLTDFVSMETDHPSLFTNQLHNFHSETGPRTITNQSPKPNSTLNQRKPPLPNLSVSRTVSTKTEKEEEERHYRGVRRRPWGKYAAEIRDPNKKGCRIWLGTYDTAVEAGRAYDQAAFQLRGRKAILNFPLDVRVTSETCSGEGVIGLGKRKRDKSSPPEEEKAARVKVEEEESNTSETTEAEVEPVVPLTPSSWMGFWDVGAGDGIFSIPPLSPTSPNFSVISVT

SEQ ID NO: 224 - DNA, 714 bp, Populus balsamifera subsp. trichocarpa
  misc_feature: Ceres ANNOT ID no.1438399
  misc_feature: Encodes the peptide sequence at SEQ ID NO 225
atggcaaccccagaagaatcctccacgttagaactcataagacaacatcttctcggagacttcacctccacagatgagttcatcagtaatcttgagtgcactgtagccagtatatctgttaaactagagaactccctatctgggtctgaatccaactccccagtatcagaccaaagttactatagcacccaagaaacctgtagctttgaaataaaatctgaaatcatagatttgacacctcctgaacccatgttttcagattcaagtaatcagtccccaccacctgaactcgtaaagatgacagatagagaagagacaatattaaggcattacagaggggtccgaagaaggccatggggaaagtttgcggcggagatccgtgacccaaccaggaagggtagtcgggtttggttaggtacttttgacagtgatatcgatgccgcaagagcttatgactgtgctgcattcaaaatgaggggcaggaaagcaatcctgaattttcctttggaggctggactgtccagctcgcctccggccacgggcaggaagaggagaagagtgaagagagaggaggtgctgccagaatctgttgatgtctcgccggaaaattgggatgtagagtggagtggagaggaagtggagggcttttctgacgaggagcaactgtcaccgttatctcgaaagccagttttgctttacgtgtcagtagattag

SEQ ID NO: 225 - protein, 237 aa, Populus balsamifera subsp. trichocarpa
  misc_feature: Ceres ANNOT ID no.1438399
  misc_feature: Score of 147.3 for HMM of FIGURE 3.
  misc_feature (109)..(161): Pfam Name: AP2 Pfam Description: AP2 domain
  misc_feature: Functional Homolog Of Ceres SEEDLINE ID no. ME02077 at SEQ ID NO. 79
MATPEESSTLELIRQHLLGDFTSTDEFISNLECTVASISVKLENSLSGSESNSPVSDQSYYSTQETCSFEIKSEIIDLTPPEPMFSDSSNQSPPPELVKMTDREETILRHYRGVRRRPWGKFAAEIRDPTRKGSRVWLGTFDSDIDAARAYDCAAFKMRGRKAILNFPLEAGLSSSPPATGRKRRRVKREEVLPESVDVSPENWDVEWSGEEVEGFSDEEQLSPLSRKPVLLYVSVD

SEQ ID NO: 226 - DNA, 705 bp, Populus balsamifera subsp. trichocarpa
  misc_feature: Ceres ANNOT ID no.1484559
  misc_feature: Encodes the peptide sequence at SEQ ID NO 227
atggcaaccccggaagaatcctcaacattagaactcataagacaacatcttcttggagacttcatctccacagacgagtttatcagtaatcttgagtccagtatagccagtgtctctgtcaaactagagagctccctttctgggtcagaacccaactccccaatatccgaccaaagttaccatagtaccccagaaacctatagctttgaaataaaacctgaaatcatagacttcacacctcctgagcccgtgttttcaggttcaagtaatcagtacccaccacctgagcctgtaaagatgacagataaaggagaaacagtaaggcattacaggggggtccgaagaaggccatggggcaagtttgcagcagagatccgtgaccctacccggaagggaagtcgggtttggttgggtacttttgacagtgatactgatgctgcaaaagcttatgactgtgctgcattcaaaatgaggggcaggaaagcaatcctgaattttccttcggaggctggactatccatcccgccgccagccacaggcaggaagagaagaagatcgaagggagaagaggtgctgccggaatctgttgatgtgtcaacggaaaattggaatttaaagtggagtggagaagtagaggagggtgtttcagatgaggagcaactgtcaccgttaacccaagaaaccatgttggcaaggctttcttaa

SEQ ID NO: 227 - protein, 234 aa, Populus balsamifera subsp. trichocarpa
  misc_feature: Ceres ANNOT ID no.1484559
  misc_feature: Score of 137.2 for HMM of FIGURE 3.
  misc_feature (108)..(160): Pfam Name: AP2 Pfam Description: AP2 domain
  misc_feature: Functional Homolog Of Ceres SEEDLINE ID no. ME02077 at SEQ ID NO. 79
MATPEESSTLELIRQHLLGDFISTDEFISNLESSIASVSVKLESSLSGSEPNSPISDQSYHSTPETYSFEIKPEIIDFTPPEPVFSGSSNQYPPPEPVKMTDKGETVRHYRGVRRRPWGKFAAEIRDPTRKGSRVWLGTFDSDTDAAKAYDCAAFKMRGRKAILNFPSEAGLSIPPPATGRKRRRSKGEEVLPESVDVSTENWNLKWSGEVEEGVSDEEQLSPLTQETMLARLS

SEQ ID NO: 228 - DNA, 1305 bp, Glycine max
  misc_feature: Ceres CLONE ID no.548557
  misc_feature: Encodes the peptide sequence at SEQ ID NO 229
aaccaattccaaattctcaactttcctaactttagcaaccatccaagaagttgatcagttccttgtctctccttgaattataaaaccattcacagtcttgaacccaatttcactctttgcacctcaaacaccttataagcctcaatttcacaaccaaaaatgcaaagttcaatctcacaatctgagatttgcatcactgattaccttctaccccaagaagttccatctcaatttcaatttccagatatgagcaacaataacataccaatgaaccataccaaccttcaaatgcctcaaatcacatctttctccaagcctccaaggtcctcatcaaatctaagcaaccgcaaaccgtccttgagaaacatcacaatcccttccataacctcaggtcttacaacaactatgtcacaaacaacaacaacaacaacaatagctacaaccatgtataacaacaatcaagttacttcttcttcagatgaaaccaacaacatcaaagagaacaagcactatagaggggttagaagaaggccatggggcaagtatgctgcagaaatccgtgaccctaatagaaaaggctcaagggtgtggcttggaacctttgacacagccatagaagctgccaaggcttatgacaaagctgctttcaagatgagagggagcaaagccatattgaatttccctttggagattggagagtcagaggaatcagtctcaagctgcatcaaggttggtgtgaagagggaaagagaggaagagagtaaaagcaacaactatgagaaaagtgagtttaacaacaataataatagtaataagcatgtgaagaaagaagagtgttctcccaaagctgtttgccctttgactccatcatgttggaaaggcttttgggacactgatgttatgggaactatctttagtgtgcctcctttgtcaccactatctccactaatggttgtttgagattgtggactttcgctatttcaatgatggtttgaggtaaccaaattaaggagagatgatgctggggattgtcctctctgatttaggttggtaatttgcgtaaatcaaaatggtagtactaattaatctactaatagattaatttgcaagtgaagatatatgggtttgtataatgtaaatataggatagtatgaagcaagatttttttgtttgttaaaaaaaaaaaaagctctcatgcttatcttcttcccttagttatgtttcatttggtcaagaaatgtactgtacttgaagcaacattgaaatttgtttattcgtttattggagaaaaaaaaaaaaaaaaaa

SEQ ID NO: 229 - protein, 266 aa, Glycine max
  misc_feature: Ceres CLONE ID no.548557
  misc_feature: Score of 175.3 for HMM of FIGURE 3.
  misc_feature (116)..(168): Pfam Name: AP2 Pfam Description: AP2 domain
  misc_feature: Functional Homolog Of Ceres SEEDLINE ID no. ME02077 at SEQ ID NO. 79
MQSSISQSEICITDYLLPQEVPSQFQFPDMSNNNIPMNHTNLQMPQITSFSKPPRSSSNLSNRKPSLRNITIPSITSGLTTTMSQTTTTTTIATTMYNNNQVTSSSDETNNIKENKHYRGVRRRPWGKYAAEIRDPNRKGSRVWLGTFDTAIEAAKAYDKAAFKMRGSKAILNFPLEIGESEESVSSCIKVGVKREREEESKSNNYEKSEFNNNNNSNKHVKKEECSPKAVCPLTPSCWKGFWDTDVMGTIFSVPPLSPLSPLMVV

SEQ ID NO: 230 - protein, 300 aa, Arabidopsis thaliana
  misc_feature: Public GI ID no.18422770
  misc_feature: Score of 435.5 for HMM of FIGURE 3.
  misc_feature (154)..(206): Pfam Name: AP2 Pfam Description: AP2 domain
  misc_feature: Functional Homolog Of Ceres SEEDLINE ID no. ME02077 at SEQ ID NO. 79
MATPNEVSALWFIEKHLLDEASPVATDPWMKHESSSATESSSDSSSIIFGSSSSSFAPIDFSESVCKPEIIDLDTPRSMEFLSIPFEFDSEVSVSDFDFKPSNQNQNQFEPELKSQIRKPPLKISLPAKTEWIQFAAENTKPEVTKPVSEEEKKHYRGVRQRPWGKFAAEIRDPNKRGSRVWLGTFDTAIEAARAYDEAAFRLRGSKAILNFPLEVGKWKPRADEGEKKRKRDDDEKVTVVEKVLKTEQSVDVNGGETFPFVTSNLTELCDWDLTGFLNFPLLSPLSPHPPFGYSQLTVV

SEQ ID NO: 231 - protein, 300 aa, Arabidopsis thaliana; identical to SEQ ID NO: 230
  misc_feature: Public GI ID no.8809606
  misc_feature: Score of 435.5 for HMM of FIGURE 3.
  misc_feature (154)..(206): Pfam Name: AP2 Pfam Description: AP2 domain
  misc_feature: Functional Homolog Of Ceres SEEDLINE ID no. ME02077 at SEQ ID NO. 79

SEQ ID NO: 232 - protein, 296 aa, Brassica oleracea
  misc_feature: Public GI ID no.89257455
  misc_feature: Score of 450.3 for HMM of FIGURE 3.
  misc_feature (150)..(202): Pfam Name: AP2 Pfam Description: AP2 domain
  misc_feature: Functional Homolog Of Ceres SEEDLINE ID no. ME02077 at SEQ ID NO. 79
MANPSEASALRFIEKHLLDELSPVATDRWMIHESAATESSSDTSPTIFGSPAAPIEFSEFENKPEIIDLSTPRFVDLISSPFEFDSEVSLSDFDLKPSYQTGNQFEPEIKTQSNRKPPLKISVPTKTEWIQFDPQPEVTKPKQAIAEEKKHYRGVRQRPWGKFAAEIRDPNKRGSRIWLGTFDTAIEAARAYDQAAFRLRGSKAILNFPLEVGKWKTRYNADGEKKRKRDDELEDVTVVEKVLKTEQNVNGKETFPLVKSDLTELYDWDLTGFLNFPLLSPLSPRPSFNYSELTVV

SEQ ID NO: 233 - protein, 307 aa, Brassica oleracea
  misc_feature: Public GI ID no.89257468
  misc_feature: Score of 399.1 for HMM of FIGURE 3.
  misc_feature (165)..(217): Pfam Name: AP2 Pfam Description: AP2 domain
  misc_feature: Functional Homolog Of Ceres SEEDLINE ID no. ME02077 at SEQ ID NO. 79
MANPSEVSSALWFIEKHLLDVVSPVAKDRWMIHESAAKDSSFDSSPMIFGSSSSSSAPIDCSESEIKPEVIDLSTPRFMDLISTPSEFNTGVSVSVSDFDFKPTFQTVNQFEPEFKTQIPCASDDSHSNRKPPLKISVPTKTEWIQFNPQPEVTKPVQPDAEEQRHYRGVRQRPWGKFASEIRDPNKRGSRIWLGTFDTAIEAARAYDEAAFRLRGSKAILNFPLEVGKWKSRKEADGEKKRKRDEIEDDHVAVVEKVLKTEQSVNGKEAFNLTEFCDWDVMGLLNFPLLSPLSPHPSFGYSQLTVV

SEQ ID NO: 234 - DNA, 1038 bp, Populus balsamifera subsp. trichocarpa
  misc_feature: Ceres ANNOT ID no.1486129
  misc_feature: Encodes the peptide sequence at SEQ ID NO 235
atgtcaacagaagtatcaacagccttagagttcattaagcaccacttgcttggcgatcttctttcacctattgctacctcctcctcagcttctttttgtcaattttctactaacactgaaatttctacttatgagactacaggctgctgctcacaggcttcgacttctgactcttccactgcatttccttattttttagattctcctggccctgatttcttcgtattctcttccgattttagccctgctcaagataacaagaccaatatcttcgagtttgaagctaaacctgaaatcattgatctcttaacgccaaaacccctcgattcaacctcccacctcaattcccaaccaagcagcagcagcagcagcagcaatagcagtaacttgttcgaatttgtgaaaccacaaattatttctcatccagtcaacaatttcttctatgaagaatcaaagcctcgagttgaaccaactcggaaaccgtcattgaaaatatcgctgcccagcagaaaatccgaatggattcagttttctaacacgaacccgcaacccgtggatgataattctggtgttgctgtagaagaaaaaaagcattacagaggagtccgacacaggccatggggcaagtacgcagcagagatacgggacccgaaccggagaggttcacgtgtgtggctaggaaccttcgatacagctctcgaagctgccagagcctatgatcgagctgccttcaagctgcgcgggtcgaaagcgattctcaattttccattagaagctgggaggtgtgatgtacgcgccaacgaagaaggtgaaaggaaaagacttagagagggtgacgcggaagagagagaggatgttaagagggttatgcgagtggttaagagagaggaacccgagagggatgttccgctgacgccgtcatgttgtacggctgtgtgggatatatgtggcgattcaaagggtgtatttaacgtgcccccattgtctccgttatctccccacccgtcgttgggatttccacagctactggttatttga

SEQ ID NO: 235 - protein, 345 aa, Populus balsamifera subsp. trichocarpa
  misc_feature: Ceres ANNOT ID no.1486129
  misc_feature: Score of 420.8 for HMM of FIGURE 3.
  misc_feature (197)..(249): Pfam Name: AP2 Pfam Description: AP2 domain
  misc_feature: Functional Homolog Of Ceres SEEDLINE ID no. ME02077 at SEQ ID NO. 79
MSTEVSTALEFIKHHLLGDLLSPIATSSSASFCQFSTNTEISTYETTGCCSQASTSDSSTAFPYFLDSPGPDFFVFSSDFSPAQDNKTNIFEFEAKPEIIDLLTPKPLDSTSHLNSQPSSSSSSSNSSNLFEFVKPQIISHPVNNFFYEESKPRVEPTRKPSLKISLPSRKSEWIQFSNTNPQPVDDNSGVAVEEKKHYRGVRHRPWGKYAAEIRDPNRRGSRVWLGTFDTALEAARAYDRAAFKLRGSKAILNFPLEAGRCDVRANEEGERKRLREGDAEEREDVKRVMRVVKREEPERDVPLTPSCCTAVWDICGDSKGVFNVPPLSPLSPHPSLGFPQLLVI

SEQ ID NO: 236 - DNA, 1068 bp, Populus balsamifera subsp. trichocarpa
  misc_feature: Ceres ANNOT ID no.1446832
  misc_feature: Encodes the peptide sequence at SEQ ID NO 237
atggaaacggatcaaactcagcaagtatcttcagccttagagtccatcaagcaacatttgcttggcgatcttctttcacctgttgctacctcctccgcttctttttatcaattttctacaaattctgcaacctctacttccctacagtgtgagactactagctgctcaagttctgacttttccacggcactccctgattttttcggttctcttctcgagttcacttccgttttgagtccctcgcaagagaacaacaccaatatcttcgaatttgaacctaaacctgaaatcattgatctctttacgccaacgccactcaactcaacctcccacatcaatttccaatcaagcagcagcagcaccggcagcagcggcggcagtaacttcttcgagtttgaatccaaacctcaaattcatcagaatttcgagtttgagtcgaaaccacaaatcgtttctcagcgaagcaacagtttcttctatgaagaaccaaagcctcaggttcaaacagctcggaaacgctctttgaaaatatcgctgcctagcaaaaaacccgaatggatccagttttcttctaacccaaacccgcaaaccgtggaggataattctggtgttgctgctcaagagataaggcattacagaggagtccgacgcaggccatggggcaagtacgcagcggagatccgggacccgaaccggagaggttcacgagtgtggctaggaaccttcgatacagaccttgaagccgctaaagcctatgatcgagctgccttcaagctgcgtgggtcgaaagcgattctcaatttcccattagaagccgggaggtgtgaggaggaaagtgaaaggaaaagaagtagagagggtggcgtggaagagagagaggatgtgaagagggtaatgacggtggttaagagggaggaacctgaaactgagggggatatcccgttgacgccgtcaagttggacggctttttgggatggtggtgatacgaaggatgtcttcaatgtgcccccgctgtctccgttatctcctcacccgccattgggattcccacagctaacggttatttga

SEQ ID NO: 237 - protein, 355 aa, Populus balsamifera subsp. trichocarpa
  misc_feature: Ceres ANNOT ID no.1446832
  misc_feature: Score of 380.6 for HMM of FIGURE 3.
  misc_feature (210)..(262): Pfam Name: AP2 Pfam Description: AP2 domain
  misc_feature: Functional Homolog Of Ceres SEEDLINE ID no. ME02077 at SEQ ID NO. 79
METDQTQQVSSALESIKQHLLGDLLSPVATSSASFYQFSTNSATSTSLQCETTSCSSSDFSTALPDFFGSLLEFTSVLSPSQENNTNIFEFEPKPEIIDLFTPTPLNSTSHINFQSSSSSTGSSGGSNFFEFESKPQIHQNFEFESKPQIVSQRSNSFFYEEPKPQVQTARKRSLKISLPSKKPEWIQFSSNPNPQTVEDNSGVAAQEIRHYRGVRRRPWGKYAAEIRDPNRRGSRVWLGTFDTDLEAAKAYDRAAFKLRGSKAILNFPLEAGRCEEESERKRSREGGVEEREDVKRVMTVVKREEPETEGDIPLTPSSWTAFWDGGDTKDVFNVPPLSPLSPHPPLGFPQLTVI

SEQ ID NO: 238 - protein, 341 aa, Vitis aestivalis
  misc_feature: Public GI ID no.40060533
  misc_feature: Score of 375.4 for HMM of FIGURE 3.
  misc_feature (190)..(242): Pfam Name: AP2 Pfam Description: AP2 domain
  misc_feature: Functional Homolog Of Ceres SEEDLINE ID no. ME02077 at SEQ ID NO. 79
MATAVEVSALQLIRQHLLGELSPKNIVVTDLTVGEEWSNGLNSEVSTSQSDSSFCFQAASCDSPVTISELFGSTDLSADFFGFVPSSTSEQSQSNFFEFETKPQIIDLTSPKGLNSSHFFEFETKPQIKDTTKTKSLDSSSQSTGKDRKPSLKISVPRPTKEIEWLEFAEPKQAATVEPAQNISHPEEKKHYRGVRQRPWGKFAAEIRDPKRRGSRVWLGTYETAIEAAKAYDRAAFQMRGSKAILNFPLEAGKSAETSTDYGRKRCREAEPEVTEMEANPPAKKEKLPEANTITRVQNDTPLTPSFWDFDLDSVGCLINVPPISPLSPHPKFGFPQLMVI

SEQ ID NO: 239 - protein, 235 aa, Capsicum annuum
  misc_feature: Public GI ID no.76097531
  misc_feature: Score of 454.4 for HMM of FIGURE 3.
  misc_feature (122)..(174): Pfam Name: AP2 Pfam Description: AP2 domain
  misc_feature: Functional Homolog Of Ceres SEEDLINE ID no. ME02077 at SEQ ID NO. 79
MGSPQENCSFDMIRQHLDDISLMEYYCPENTLYSQSCESLDQTSVSFETSSNLDDISSFFSSSKTDFGCFEFETKPITSAATSISSNSPKKRSFNERKPSLNIAVPVKPVVVQKVEVVREKKHYRGVRQRPWGKFAAEIRDPNRKGTRVWLGTFDTAVDAAKAYDRAAFKLRGSKAILNFPLEVANFKQQNSTVEVPQQVNSSGSKRAREKEELAINEKKKKKKKNLAAPRPSPI

SEQ ID NO: 240 - protein, 276 aa, Capsicum annuum
  misc_feature: Public GI ID no.60459379
  misc_feature: Score of 387.0 for HMM of FIGURE 3.
  misc_feature (125)..(177): Pfam Name: AP2 Pfam Description: AP2 domain
  misc_feature: Functional Homolog Of Ceres SEEDLINE ID no. ME02077 at SEQ ID NO. 79
MDTSSLDLIRQHLLDDDVVFMENYCTSSETTSTLYSQSSSSSESLESFVSELKTESNFSFYPESSNLEFCSFFNNNSKMEFNPSEFQVKPQKKKSFNERKPLLNISIPSVKKTDESKTGENSEKKRYRGVRQRPWGKFAAEIRDPNRKGTRVWLGTFDTAVDAAMAYDRAAFKLRGSKAILNFPLEVSNFRQENNEIEKKVNLNSCGKRAREEIENEDQVVMKKEVKREQMVATPLTPSSWAPIWDCGNAKGIFEVPPLSPLSPHPSFGFSQLLVS

SEQ ID NO: 241 - protein, 244 aa, Solanum lycopersicum
  misc_feature: Public GI ID no.45642990
  misc_feature: Score of 388.5 for HMM of FIGURE 3.
  misc_feature (103)..(155): Pfam Name: AP2 Pfam Description: AP2 domain
  misc_feature: Functional Homolog Of Ceres SEEDLINE ID no. ME02077 at SEQ ID NO. 79
MGSPQETCTSLDLIRQHLFDESLDQTCFSFETTQTSNLDDIASFFNATSKTEYDGFFEFEAKRHVIHSNSPKQSNLRERKPSLNVAIPAKPVVVVENVEIEKKHYRGVRQRPWGKFAAEIRDPNRKGTRVWLGTFDTAVDAAKAYDRAAFKLRGSKAILNFPLEVANFKQQNDETKTETKSSGSKRVRGETEELVIKKERKIEEERVLPTAAAPLTPSSWSTIWDEKGIFEVPPLSPLSQLVMI

SEQ ID NO: 242 - protein, 281 aa, Arabidopsis thaliana
  misc_feature: Public GI ID no.3298498
  misc_feature: Score of 677.1 for HMM of FIGURE 3.
  misc_feature (135)..(187): Pfam Name: AP2 Pfam Description: AP2 domain
  misc_feature: Functional Homolog Of Ceres SEEDLINE ID no. ME02077 at SEQ ID NO. 79
MATPNEVSALFLIKKYLLDELSPLPTTATTNRWMNDFTSFHQTGFEFSEFETKPEIIDLVTPKPEISDFEVKSEISIESNDSFTFQSNPPRVTVQSNRKPPLKIAPPNRTKWIQFATGNPKPELPEPVVAAEEKRHYRGVRMRPWGKFAAEIRDPTRRGTRVWLGTFETAIEAARAYDKEAFRLRGSKAILNFPLEVDKWNPRAEDGRGLYKRKRDSEEEEVKVVKKVLKKEESYAVSDGENVESGLTAIDDWDLTEFLSMPLLSPLSPHPPFGYPQLTVV

SEQ ID NO: 243 - DNA, 805 bp, Arabidopsis thaliana
  misc_feature: Ceres CLONE ID no.268310
  misc_feature: Encodes the peptide sequence at SEQ ID NO 244
gtcaaatcaaatccttcttcctcttcaattctctgtttcctccaaaatggctacaccaaacgaagtatcagctcttttcctcatcaagaagtatctcctcgacgaattgtctccgttgcctactactgccaccaccaatcgatggatgaacgatttcacgtcatttcatcaaaccggtttcgagttttctgaatttgaaaccaaaccggaaataatcgatctcgtcactcccaaaccggagatttctgatttcgaggtgaaatctgaaatttcaattgaatcgaacgattccttcacgttccaatcgaatcctcctcgtgtcactgttcaatccaatcgaaaaccgccgttgaagatcgcaccaccgaaccgaaccaagtggattcaattcgcaaccggaaatcctaaaccggaacttcccgaaccggttgtagcagcagaagagaagaggcattacagaggagtgaggatgaggccgtggggaaaattcgcggcggagatccgagatccgactcgtcgtggaactcgggtttggcttgggacgtttgagacggcgatcgaagcggctagagcttacgacaaagaagcgtttagactacgaggatcaaaggcgattctgaatttcccgcttgaagttgacaagtggaatccacgcgctgaagatggtcgtggcctgtacaaacggaagagagacagcgaggaggaggaagtgaaggtggtgaagaaagtgctaaagaaggaggagagttacgccgttagcgacggagagaatgttgagtcaggtttgacggcgatagatgactgg

SEQ ID NO: 244 - protein, 253 aa, Arabidopsis thaliana
  misc_feature: Ceres CLONE ID no.268310
  misc_feature: Score of 564.6 for HMM of FIGURE 3.
  misc_feature (135)..(187): Pfam Name: AP2 Pfam Description: AP2 domain
  misc_feature: Functional Homolog Of Ceres SEEDLINE ID no. ME02077 at SEQ ID NO. 79
MATPNEVSALFLIKKYLLDELSPLPTTATTNRWMNDFTSFHQTGFEFSEFETKPEIIDLVTPKPEISDFEVKSEISIESNDSFTFQSNPPRVTVQSNRKPPLKIAPPNRTKWIQFATGNPKPELPEPVVAAEEKRHYRGVRMRPWGKFAAEIRDPTRRGTRVWLGTFETAIEAARAYDKEAFRLRGSKAILNFPLEVDKWNPRAEDGRGLYKRKRDSEEEEVKVVKKVLKKEESYAVSDGENVESGLTAIDDW

SEQ ID NO: 245 - protein, 282 aa, Arabidopsis thaliana; identical to SEQ ID NO: 128
  misc_feature: Public GI ID no.18414895
  misc_feature: Score of 643.8 for HMM of FIGURE 3.
  misc_feature (135)..(187): Pfam Name: AP2 Pfam Description: AP2 domain
  misc_feature: Functional Homolog Of Ceres SEEDLINE ID no. ME02077 at SEQ ID NO. 79

SEQ ID NO: 246 - protein, 282 aa, Arabidopsis thaliana
  misc_feature: Public GI ID no.17473792
  misc_feature: Score of 640.9 for HMM of FIGURE 3.
  misc_feature (135)..(187): Pfam Name: AP2 Pfam Description: AP2 domain
  misc_feature: Functional Homolog Of Ceres SEEDLINE ID no. ME02077 at SEQ ID NO. 79
MATPNEVSALFLIKKYLLDELSPLPTTATTNRWMNDFTSFDQTGFEFSEFETKPEIIDLVTPKPEIFDFDVKSEIPSESNDSFTFQSNPPRVTVQSNRKPPLKIAPPNRTKWIQFATGNPKPELPVPVVAAEEKRHYRGVRMRPWGKFAAEIRDPTRRGTRVWLGTFETAIEAARAYDKEAFRLRGSKAILNFPLEVDKWNPRAEDGRGLYNKRKRDGEEEEVTMVEKVLKTEESYDVSGGENVESGLTAIDDWDLTEFLSMPLLSPLSPHPPFGYPQLTVV

SEQ ID NO: 247 - protein, 291 aa, Nicotiana tabacum; identical to SEQ ID NO: 90
  misc_feature: Public GI ID no.57012758
  misc_feature: Score of 584.2 for HMM of FIGURE 3.
  misc_feature (143)..(195): Pfam Name: AP2 Pfam Description: AP2 domain
  misc_feature: Functional Homolog Of Ceres SEEDLINE ID no. ME02077 at SEQ ID NO. 79

SEQ ID NO: 248 - protein, 282 aa, Nicotiana sylvestris; identical to SEQ ID NO: 89
  misc_feature: Public GI ID no.57012874
  misc_feature: Score of 664.3 for HMM of FIGURE 3.
  misc_feature (136)..(188): Pfam Name: AP2 Pfam Description: AP2 domain
  misc_feature: Functional Homolog Of Ceres SEEDLINE ID no. ME02077 at SEQ ID NO. 79

SEQ ID NO: 249 - protein, 437 aa, Medicago truncatula
  misc_feature: Public GI ID no.92871428
  misc_feature: Score of 188.3 for HMM of FIGURE 5.
  misc_feature (25)..(424): Pfam Name: Aa_trans Pfam Description: Transmembrane amino acid transporter protein
  misc_feature: Functional Homolog Of Ceres SEEDLINE ID no. ME06123 at SEQ ID NO. 94
MVLNPTLPSKKVQSIQKCVDNGPDRQGKWWYSTFHTVTAMIGAGVLSLPYAMAYLGWGPGILMLLLSWCLTLNTMWQMIQLHECVPGTRFDRYIDLGRHAFGPKLGAWIVLPQQLIVQVGCDTVYMVIGGKCLKNFVEMAFISCTQIKQTYWIMIFGGIHFFLSQLPNFNSVSGVSLAASVMSLSYSTIAWVACLSRGRIDNVNYAYKQISKTDLLFRVFSALGQISFAFSGQAVTLEIQATIPSTPEKPSKIPMWKGAICAYLINAICYFPVATLGYWAFGQDVDDNILMSLERPSWLVASANLMVFINVLGSYQVYAMPVFDLIEGTMVRRLNFPPSVALRLVARSAYVAFTLLFGVSFPFFGDLLGFFGGFGFAPTSYFLPSIMWLIIKKPRRFSINWFINWVAICIGVCIMLASTIGGLRNIIVDSSTYSFYT

SEQ ID NO: 250 - DNA, 1404 bp, Populus balsamifera subsp. trichocarpa
  misc_feature: Ceres ANNOT ID no.1473784
  misc_feature: Encodes the peptide sequence at SEQ ID NO 251
atgaatcaaatgcagccagtaaaggatatctcaagcattgagaatgcaaagaatgacaatgcgaagaaagacatgaatgactggcttcccatcaccaagtctaggaatgcaaagtggtggtattctgcctttcacaatgttacagccatggttggtgctggggtcctgggcctcccatatgccatgtctcaacttggatggggtcccggtgctgctgtattgatcctgtcatgggttatcactctatatacactatggcagatggtggagatgcatgaaatggtgcctggaaagagatttgataggtatcatgagttagggcagcatgcatttggtgaaaaacttgggctttgggtggtggttccccagcaactaatggtggaagtgggttcgagtatagtgtatatgatcactggagggaaatctctgaagaaggctcatgatactatctggcctaactacaaagaaatcaaacttacctatttcatcatgatcttttcctcggttcactttgtcatctctcatctccccagtttcaactccatcaccgttgtctctcttgccgctgccgtcatgtccttgagttactcgactattgcgtgggtggtttcatggcacaaaggggttcaaccagatgtgcagtatacctcaagggcttcaacaaataccgggcagatgttcgacagcttcagtgctctaggagatatagcttttgccttcgcagggcacagtgtggcgttggagatccaggcaacaatcccttccacaccagggaagccttccaagaaaccaatgtggaaaggagtggttgttgcttatcttgttgtcgctttgtgttacttacctgttagtttcgtaggttactgggtgtttggaaacaaagttgaggacaacatactcttatcactagagaagcctcgttggcttgttgccgtcgctaatttgtttgttgtcattcatgtcattggaagctatcaggtttttgcaatgccggtgtttgatatgatggaagcattcctagtcttgaaaatgaatttccaaccgggattgaccatgttcatcgcaatgacattcccattttttggtgggcttctaagtttctttggaggatttgcctttgctcccacctcatactatgtaaggcaccatgttatacatatctatgcttatctttcttgcttcaataaacaatatgcaaagctcaaaatgccgcaattgtttgcaatctctttgcagctcccctgcgtcatttggcttgctatatataaaccaaagaaattcagcttgtcatggctcgcaaattggatatgcattatccttggcgttgtattgatggtattagcccccattggagcattaaggcagataatactacaagccagggacttccagttttactcttga

SEQ ID NO: 251 - protein, 464 aa, Populus balsamifera subsp. trichocarpa
  misc_feature: Ceres ANNOT ID no.1473784
  misc_feature: Score of 191.5 for HMM of FIGURE 5.
  misc_feature (32)..(451): Pfam Name: Aa_trans Pfam Description: Transmembrane amino acid transporter protein
  misc_feature: Functional Homolog Of Ceres SEEDLINE ID no. ME06123 at SEQ ID NO. 94
MQPVKDISSIENAKNDNAKKDMNDWLPITKSRNAKWWYSAFHNVTAMVGAGVLGLPYAMSQLGWGPGAAVLILSWVITLYTLWQMVEMHEMVPGKRFDRYHELGQHAFGEKLGLWVVVPQQLMVEVGSSIVYMITGGKSLKKAHDTIWPNYKEIKLTYFIMIFSSVHFVISHLPSFNSITVVSLAAAVMSLSYSTIAWVVSWHKGVQPDVQYTSRASTNTGQMFDSFSALGDIAFAFAGHSVALEIQATIPSTPGKPSKKPMWKGVVVAYLVVALCYLPVSFVGYWVFGNKVEDNILLSLEKPRWLVAVANLFVVIHVIGSYQVFAMPVFDMMEAFLVLKMNFQPGLTMFIAMTFPFFGGLLSFFGGFAFAPTSYYVRHHVIHIYAYLSCFNKQYAKLKMPQLFAISLQLPCVIWLAIYKPKKFSLSWLANWICIILGVVLMVLAPIGALRQIILQARDFQFYS

SEQ ID NO: 252 - protein, 450 aa, Arabidopsis thaliana
  misc_feature: Public GI ID no.7239491
  misc_feature: Score of 128.7 for HMM of FIGURE 5.
  misc_feature (37)..(437): Pfam Name: Aa_trans Pfam Description: Transmembrane amino acid transporter protein
  misc_feature: Functional Homolog Of Ceres SEEDLINE ID no. ME06123 at SEQ ID NO. 94
MPKYLDQNDEENKGRSTDNNNHRQMDYNDWLPVTASREAKWYYSAFHNVTAMVGAGVLGLPFAMSQLGWGPGLVAIIMSWAITFYSLWQMVQLHEAVPGKRLDRYPELGQEAFGPKLGYWIVMPQQLLVQIASDIVYNVTGGKSLKKFVELLFPNLEHIRQTYYILGFAALQLVLSQSPDFNSIKIVSLLAALMSFLYSMIASVASIAKGTEHRPSTYGVRGDTVASMVFDAFNGIGTIAFAFAGHSVVLEIQATIPSTPEVPSKKPMWKGVVVAYIIVIICYLFVAISGYWAFGAHVEDDVLISLERPAWLIAAANFMVFIHVIGSYQVFAMIVFDTIESYLVKTLKFTPSTTLRLVARSTYVALICLVAVCIPFFGGLLGFFGGLVFSSTSYFLPCIIWLIMKRPKRFSAHWWCSWVAIVTGISIAILAPIGGMRHIILSARTYKLFS

SEQ ID NO: 253 - protein, 437 aa, Medicago truncatula
  misc_feature: Public GI ID no.92871429
  misc_feature: Score of 186.7 for HMM of FIGURE 5.
  misc_feature (25)..(424): Pfam Name: Aa_trans Pfam Description: Transmembrane amino acid transporter protein
  misc_feature: Functional Homolog Of Ceres SEEDLINE ID no. ME06123 at SEQ ID NO. 94
MVSTPSLPSKETQSEQKEVENGPARRAKWWYSTFHTVTAMIGAGVLSLPYAMAYLGWGPGILMLLLSWCLTLNTMWQMIQLHECVPGTRFDRYIDLGRHAFGPKLGAWIVLPQQLIVQVGCDIVYMVIGGKCLKQFVEIACTDCTQIKQSYWIMIFGGIHFFLSQLPNFNSVACVSLAAAVMSLSYSTIAWVACLPRGRIDNVSYAYKPISKTDLLFRVFNALGQISFAFAGHAVTLEIQATIPSTPEKPSKIAMWNGAICAYFINAICYFPVAIIGYWTFGQDVNDNILMSLEKPSWLIASANLMVFIHVVGSYQVYAMPVFDLIERMMMRRLNFPPGVALRLVARSAYVAFTLFFGVTFPFFGDLLGFFGGFGFAPTSYFLPSIMWMIIKKPKKFSINWFINWAGIYIGVCIMLASTVGGLRNIIADSSTYSFYT

SEQ ID NO: 254 - DNA, 1251 bp, Populus balsamifera subsp. trichocarpa
  misc_feature: Ceres ANNOT ID no.1516369
  misc_feature: Encodes the peptide sequence at SEQ ID NO 255
atgccatccaatgagtcacagaacgatgaagcagcaagagaaaaggccataaatgattggcttccagtcacttcctcgaggaatgccaaatggtggtactcaaccttccacaatgtcactgccatggttggtgctggtgttcttagtctcccctatgccatggctcaacttggatggggaccaggtgttgccatactttttttatcatgggtgatcacgttatacactctatggcaaatggttgaaatgcatgagatggttcctggtaagcgatttgatagataccatgagctagggcaacatgcgtttggagagaagctgggtctctggattgttgtgccacagcaactagttgtacaagttggagtaaacatagtctatatggttaccggaggaaaatcattgaagaagttccatgatttggtttgctccgactgcaaagacatcaggctaacgtacttcatcatgattttcgcttcgcttcagtttgttctggctcatcttcccaatctcaactccattagtgttatctctctggctgcagcagtcatgtccttgagttactccacaattgcctggggagccacccttaataagggtgttcagcctgatgtcgactacagctataaagcgagcactaaaaccggagctgtctttgactttttctctgccttgggtgatatagcttttgcatatgccggtcacaatgtgatcttggagatccaagcaacaattccctctactccagagaagccttccaagaaacccatgtggagaggagccttccttgcatatgttgtcgtcgccatctgctacttcccagttgccttgattggatactggttttttggaaacagcgtggaagacaacattcttatctcactcgagaaaccagcttggcttattgcaactgctaacatgtttgttgtcattcatgttattggaagttatcagatatatgctatggcagtgttcgacatgttggaaactgcattggtgaagaaactccatttttctccttctttcatgcttcgctttgttactcgcacggtatatgttgggttcacaatgattgttggtatatgtattccattcttcggtggcctgctttcgttcttcggaggatttgcttttgccccaacaacatactttgtctgcattgtgcttggaattttgctgatgatattgtcacccattggtgccctaagacatatcatccttacagccaaagactacgagttcttctcatga

SEQ ID NO: 255 - protein, 416 aa, Populus balsamifera subsp. trichocarpa
  misc_feature: Ceres ANNOT ID no.1516369
  misc_feature: Score of 152.1 for HMM of FIGURE 5.
  misc_feature (27)..(384): Pfam Name: Aa_trans Pfam Description: Transmembrane amino acid transporter protein
  misc_feature (27)..(403): Pfam Name: Aa_trans Pfam Description: Transmembrane amino acid transporter protein
  misc_feature: Functional Homolog Of Ceres SEEDLINE ID no. ME06123 at SEQ ID NO. 94
MPSNESQNDEAAREKAINDWLPVTSSRNAKWWYSTFHNVTAMVGAGVLSLPYAMAQLGWGPGVAILFLSWVITLYTLWQMVEMHEMVPGKRFDRYHELGQHAFGEKLGLWIVVPQQLVVQVGVNIVYMVTGGKSLKKFHDLVCSDCKDIRLTYFIMIFASLQFVLAHLPNLNSISVISLAAAVMSLSYSTIAWGATLNKGVQPDVDYSYKASTKTGAVFDFFSALGDIAFAYAGHNVILEIQATIPSTPEKPSKKPMWRGAFLAYVVVAICYFPVALIGYWFFGNSVEDNILISLEKPAWLIATANMFVVIHVIGSYQIYAMAVFDMLETALVKKLHFSPSFMLRFVTRTVYVGFTMIVGICIPFFGGLLSFFGGFAFAPTTYFVCIVLGILLMILSPIGALRHIILTAKDYEFFS

SEQ ID NO: 256 - protein, 425 aa, Oryza sativa subsp. indica
  misc_feature: Public GI ID no.125548592
  misc_feature: Score of 124.3 for HMM of FIGURE 5.
  misc_feature (22)..(412): Pfam Name: Aa_trans Pfam Description: Transmembrane amino acid transporter protein
  misc_feature: Functional Homolog Of Ceres SEEDLINE ID no. ME06123 at SEQ ID NO. 94
MVTSSVLPKVVDDAGEGEANPRRAKWWYATFHSVTAMVGAGVLSLPYAMAHLGWGPGTAALVVSWGMTLYTLRLLIELHECVPGVRFDRYRDLGAHALGPRLGPWLVVPQQLIVQLGCDVVYMVIGGKCLMKFAESVSSWSRAPQLHHQSYWICIFGASQFLLSQLPSLDSITAVSLAAAAMSVGYSTISWAACLARGTPAAAEGGGGGGELRVAFAYAGHGVVLEIQATIPSTPTKPSRGAMWKGAVAAYLVTALCYFPVAIAGYWAFGRDVSDNVLVALRRPPWLVAAANMMVVVHVLGSYQVYAMPIFETLETILITRIRLPPGALLRLVARSAYVAFTLFVAVTFPFFGDLLGFFGGFGFTPTSYFLPCILWLKIKKPPRFSASWFANWGCIVVGVLLMIASTIGGLRSIIQDASTFQFYS

SEQ ID NO: 257 - DNA, 1155 bp, Populus balsamifera subsp. trichocarpa
  misc_feature: Ceres ANNOT ID no.1517322
  misc_feature: Encodes the peptide sequence at SEQ ID NO 258
atggtttcaacttctccttccaaggaagatcagtccatgagcaaatggacggaaggcgaccctgctcgccgagccaaatggtggtactcaactttccactctgtcacagccatgatcggtgcaggtgttctcagtctgccctatgccatggcttacttaggctggggtccagggataatggtcttagcgttatcctggtgcatgaccttgaacacaatgtggcaaatgatccaactccatgaatgtgttcccgggactcgctttgatcgctacatcgacctaggtcgacatgccttcgggccgaaattgggaccatggattgtcctacctcagcaactgattgttcaagttggttgtgatattgtgtacatggtcacaggaggaaagtgtttaaagaagttcatggagatgacctgcgcctcttgcacaccaataaggcagtcttactggattttgatctttggtggcattcatttcttcttgtcccagcttcctaatttcaattctgttgctggcgtttcactagctgcagcagtcatgtcactcagttattcaaccatagcatgggcaggttctttggctcatggccagattgataatgtgagctatgcttacaaaagcaccagcgcagctgactacatgtttcgtgtcttcaatgcactgggagaaatttcttttgcatttgctggccatgcagttgttcttgaaatccaagctacaattccatcaactcctgagaagccttccaaaataccaatgtggaaaggtgcactgggtgcttactttatcaatgcaatttgctattttcctgttgccattatagggtattgggcatttggacaagatgttgatgataatgtgcttactgatctcaaaagacccgcatggctcatcgcctccgctaatttaatggtggtagttcatgtcattggtagctaccaggtctatgctatgcctgtttttgacatgctagagaggatgatgatgaaaagactcaatttcccaccaggaattgcactaagactcctaactcgctctacttacgttgcatttacactatttgttggagtcaccttcccattctttggagatcttcttggtttctttggtggatttggttttgcccccacttcatattttgtaagcctctcttag

SEQ ID NO: 258 - protein, 384 aa, Populus balsamifera subsp. trichocarpa
  misc_feature: Ceres ANNOT ID no.1517322
  misc_feature: Score of 155.0 for HMM of FIGURE 5.
  misc_feature (23)..(380): Pfam Name: Aa_trans Pfam Description: Transmembrane amino acid transporter protein
  misc_feature: Functional Homolog Of Ceres SEEDLINE ID no. ME06123 at SEQ ID NO. 94
MVSTSPSKEDQSMSKWTEGDPARRAKWWYSTFHSVTAMIGAGVLSLPYAMAYLGWGPGIMVLALSWCMTLNTMWQMIQLHECVPGTRFDRYIDLGRHAFGPKLGPWIVLPQQLIVQVGCDIVYMVTGGKCLKKFMEMTCASCTPIRQSYWILIFGGIHFFLSQLPNFNSVAGVSLAAAVMSLSYSTIAWAGSLAHGQIDNVSYAYKSTSAADYMFRVFNALGEISFAFAGHAVVLEIQATIPSTPEKPSKIPMWKGALGAYFINAICYFPVAIIGYWAFGQDVDDNVLTDLKRPAWLIASANLMVVVHVIGSYQVYAMPVFDMLERMMMKRLNFPPGIALRLLTRSTYVAFTLFVGVTFPFFGDLLGFFGGFGFAPTSYFVSLS

SEQ ID NO: 259 - DNA, 1953 bp, Populus balsamifera subsp. trichocarpa
  misc_feature: Ceres ANNOT ID no.1459650
  misc_feature: Encodes the peptide sequence at SEQ ID NO 260
atggcttacaacgagtcacggaatgatgcagcagcaaaagagaaggccatagatgattggcttccaatcacttcctctaggaaagccaaatggtggtactcaaccttccacaatgttactgccatggttggtgctggtgtccttagcctcccctatgccatggctcaacttggatggggaccaggaatcgccatacttgttttgtcatgggtgatcacgttgtacactctgtggcaaatggtcgaaatgcatgagatggtgcctggcaagcgatttgacaggtaccatgagctagggcaacatgtgtttggagacaagctgggtctctggattgttgtgccacagcaactaattgttcaagttggagtaaatattgtctacatggttactggaggaaaatcattgaagaagttccatgatgtggtttgccccaactgcaaagacatcaggctaacatacttcatcatgattttcgcctcagttcagatggtactggctcatcttcccaatctcaactccattagtgtaatctcgctggctgcagcagtcatgtccttaagttactctacaattgcttgggctgtcacgcttaacaagggggttcagcctgatgtcgactacagctacaaagcaagaactagaacaggagctttctttgactttatcactgccttgggtgatgtagcttttgcatatgctggtcacaatgtggtcttggagattcaagcaacaatcccttcttctccagagaagccttccaagaaacccatgtggagaggagctttccttgcatatctcgtcgtcgccttctgctacttcccagttgccttgattggatactggtgttatggcaacagcgtggacgacaacattctaatctcactgcagaaaccatcttggcttattgcagctgctaacatgtttgttgtcattcatgttattggaagctaccagatatatgcaattgcagtgttcgacttgctggaaactgcattgcttccaggccactctatttttctatcagcaagcaagctacctgttctgaatacctctgtaagtctgcatctgcaactttgggtgctaaatcttttcttcgacttggttgcttcagggctcacaatgtttgttgctcccctgcgtcatgtggctttccatctacaaaccgaagaggttcggcttctcttggacagcaaattgggtctgcgttatacttggcgttctcttgatgatactgtcacccattggtgccctaaggcatatcatccttacagccaaggactacgaattcttctcatgaacatctttccaaaagcgatcacaagggcagggcaaatttggagagagggtatcaacaattattttgctggttgtgccctcagcaggaaactcgaatttaacaattctggaatttatgttagggtttctcttcataaccatcaacatgatatgcaaatccatcattgcctaggtctttctttctgtataagttacaatctgaagccatcatccatcgtctcaagctgggagatttactatctcaataggcaactctatgaatcgacagatcaaaatggtgaaatggatgggtttttgttgcgcttgcaaaatgaactgaaagaagctgttgttaaagaggaacccagtctgcatatctatccaagcaaagatgtggacatgatcttgaattatgatgaagaagatttgaaagaagaaatccccagcactccaacagacaaatctctaaaactctacttggagccatctgattcaacatccaaattgcgtgtaaatggctattcttttgggaaaccgtcagaacatgtgacaccctttggacgatgtactgataagtttgtggtcaaattcaacattgataacctttcagatgtggagaacgatgatgatgagcatggccatgggaaacttgaggatgaaattattaagagggcttaa

SEQ ID NO: 260 - protein, 650 aa, Populus balsamifera subsp. trichocarpa
  misc_feature: Ceres ANNOT ID no.1459650
  misc_feature: Score of 123.6 for HMM of FIGURE 5.
  misc_feature (27)..(330): Pfam Name: Aa_trans Pfam Description: Transmembrane amino acid transporter protein
  misc_feature: Functional Homolog Of Ceres SEEDLINE ID no. ME06123 at SEQ ID NO. 94
MAYNESRNDAAAKEKAIDDWLPITSSRKAKWWYSTFHNVTAMVGAGVLSLPYAMAQLGWGPGIAILVLSWVITLYTLWQMVEMHEMVPGKRFDRYHELGQHVFGDKLGLWIVVPQQLIVQVGVNIVYMVTGGKSLKKFHDVVCPNCKDIRLTYFIMIFASVQMVLAHLPNLNSISVISLAAAVMSLSYSTIAWAVTLNKGVQPDVDYSYKARTRTGAFFDFITALGDVAFAYAGHNVVLEIQATIPSSPEKPSKKPMWRGAFLAYLVVAFCYFPVALIGYWCYGNSVDDNILISLQKPSWLIAAANMFVVIHVIGSYQIYAIAVFDLLETALLPGHSIFLSASKLPVLNTSVSLHLQLWVLNLFFDLVASGLTMFVAPLRHVAFHLQTEEVRLLLDSKLGLRYTWRSLDDTVTHWCPKAYHPYSQGLRILLMNIFPKAITRAGQIWREGINNYFAGCALSRKLEFNNSGIYVRVSLHNHQHDMQIHHCLGLSFCISYNLKPSSIVSSWEIYYLNRQLYESTDQNGEMDGFLLRLQNELKEAVVKEEPSLHIYPSKDVDMILNYDEEDLKEEIPSTPTDKSLKLYLEPSDSTSKLRVNGYSFGKPSEHVTPFGRCTDKFVVKFNIDNLSDVENDDDEHGHGKLEDEIIKRA

SEQ ID NO: 261 - protein, 414 aa, Oryza sativa subsp. japonica
  misc_feature: Public GI ID no.125593423
  misc_feature: Score of 136.9 for HMM of FIGURE 5.
  misc_feature (38)..(401): Pfam Name: Aa_trans Pfam Description: Transmembrane amino acid transporter protein
  misc_feature: Functional Homolog Of Ceres SEEDLINE ID no. ME06123 at SEQ ID NO. 94
MSATEVMEECTETARERREEERLRNVNLDDWLPITSSRTAKWYYSAFHNVTAMVGAGVLGLPFAMSQLGWPTGVAAIASSFAITLYTLWQLVGTDIVYMVTGGQTLKKFVELACDGRCADIRLTFYIMMFASAQFVLSQCPNFNSISAVSAAAAAMSLCYSMIAFFASVLKAHPAAAAAVDYGFKGTTAAGRVFGAFNALGAVSFAFAGHNVVLEIQATIPSTPERPSKRPMWRGVVVAYAVVALCYFTVAFGGYHAFGNAVAPNVLISLEKPRWLVAAANLMVVVHVIGAYQVYAMPVFDMIETVLAKKLHLRPGLPLRVTARSAYVALTMFIGITFPFFDGLLGFFGGFGFAPTTYFIPCIIWLIMRKPAKYSLSWLMNWCFIIIGMLLMLVSPIGGLRQIILDASKYKFYS

SEQ ID NO: 262 - DNA, 2245 bp, Panicum virgatum
  misc_feature: Ceres CLONE ID no.1796001
  misc_feature: Encodes the peptide sequence at SEQ ID NO 263
acagctctactacctctcctaccccctcctccacctctgtggtctctagctacctccctctccattgctcaagtcgccgcggcatccattgccatggcagtccagccgtccatggagacgcaagcgcccgggaattcttctccacccaaggatggcaggagcgccgaggagaaggctgtggaggactggctcccgatcaacgcgtcgcggaacgccaagtggtggtactcggcgttccacaatgtcacggccatggtcggcgctggcgtgctcggcctcccctacgccatgtccgagctcggctggggcgccggcatcgccgtgctggtcctgtcgtgggtcatcactctgtacacgctgtggcagatggtggagatgcacgagatggtgccgggccggcggttcgaccggtaccacgagctcgggcagtacgccttcggcgagaagttgggcctctggatcgtcgtgccgcagcagctgatcgtggaggtgggcgtgaacatcgtgtacatggtcaccgggggcacctcgctcaagaagttccacgacaccgtctgcgaagactgcaagagcatcaagctcacctacttcatcatgatcttcgcctccgtccacttcgtgctctcccagctccccaacttcaactccatctccggcgtctccctcgccgccgccgtcatgtcgctcagttactccacgatcgcgtggggcgcgtcggtggacaaggggaagctggaggacgtggactacagcctgcgggcgacgacgacgccggggaaggtgttcggcttcctaggggcgctggggaccgtggcgttcgcgtacgcggggcacaacgtggtgctggagatccaggccaccatcccgtcgacgccggagaagccatccaagaaacccatgtggaggggcgtcgtcgtcgcctacatcgtcgtcgcggtgtgctacttccccgtctcgctcgtcggctactgggccttcggcaacagagttgacagcgacatcctcatcacgctctccaggccaaagtggctcatcgccctcgccaacttgatggtcgtcatccatgtcatcggcagctaccagatttacgcgatgccggtgttcgacatgatagagacggtgctggtgaagagactaaaattccctccaggcctgacgctccggctgattgctcggactgtctatgtcgcgttcacaatgttcatagcaatcaccttccctttctttgatggactgctcagtttctttggtggatttgcattcgcaccgactacctatttccttccgtgcattatgtggcttgcaatctacaaaccgaaaaggttcagcctatcatggttcactaactggatttgcattgttcttggagtgctgctgatggtactggcgccaattggaggactccggaatatcattctgaatgcaaagacatacaaattctaccagtaaacatgattagctaacacaaacaccttgttttgacctacagttaacaggactgcagaatgtctcggatcatcatcagctgaaaccagttctggatttgatacagcgtgacactacaatttttttggcaccacaaaaaactcgtattaagtggtgcaaggaaaccgactactgtgtctaatatgagccttttggaaagaaaaaatgggaatgccatggcatcaatacaaatttggaacatgtttcagttgatgacgcctcttgacatgtcctgttagtgttaaactaggaatttgagctgagttaaacatataatattcttgggcaatttttgcttttatgcgcatagactagggagaacaaatcctggtggtttgtttttcttccatccaaagttcactaatgttttggagttggaagtttgaaatagtgccaagaatatgttatttgggacttgagatttggccttttcatttcatttcattcctactactacatagtaatgtttcttctactcagctatccattggcttcatacttggactatcctacggaagacagcttagtggatttggttgcagctgttttgcccttgtggtcaaagagtgttttacccaggaatatgatggtggtcagtcttcggattgatagctattagcatgcatgtactcttttgtttcttttttattttctatcctccaagatcttgtatcatcttgatgtaaattggaaattaataatatttttcttataataaaacacaccaatctttctttcttaaaaaaaaaaaaaaaaaaaa

SEQ ID NO: 263 - protein, 451 aa, Panicum virgatum
  misc_feature: Ceres CLONE ID no.1796001
  misc_feature: Score of 295.3 for HMM of FIGURE 5.
  misc_feature (39)..(438): Pfam Name: Aa_trans Pfam Description: Transmembrane amino acid transporter protein
  misc_feature (39)..(438): Pfam Name: Aa_trans Pfam Description: Transmembrane amino acid transporter protein
  misc_feature: Functional Homolog Of Ceres SEEDLINE ID no. ME06123 at SEQ ID NO. 94
MAVQPSMETQAPGNSSPPKDGRSAEEKAVEDWLPINASRNAKWWYSAFHNVTAMVGAGVLGLPYAMSELGWGAGIAVLVLSWVITLYTLWQMVEMHEMVPGRRFDRYHELGQYAFGEKLGLWIVVPQQLIVEVGVNIVYMVTGGTSLKKFHDTVCEDCKSIKLTYFIMIFASVHFVLSQLPNFNSISGVSLAAAVMSLSYSTIAWGASVDKGKLEDVDYSLRATTTPGKVFGFLGALGTVAFAYAGHNVVLEIQATIPSTPEKPSKKPMWRGVVVAYIVVAVCYFPVSLVGYWAFGNRVDSDILITLSRPKWLIALANLMVVIHVIGSYQIYAMPVFDMIETVLVKRLKFPPGLTLRLIARTVYVAFTMFIAITFPFFDGLLSFFGGFAFAPTTYFLPCIMWLAIYKPKRFSLSWFTNWICIVLGVLLMVLAPIGGLRNIILNAKTYKFYQ

SEQ ID NO: 264 - protein, 447 aa, Oryza sativa subsp. japonica
  misc_feature: Public GI ID no.115474609
  misc_feature: Score of 294.3 for HMM of FIGURE 5.
  misc_feature (33)..(434): Pfam Name: Aa_trans Pfam Description: Transmembrane amino acid transporter protein
  misc_feature: Functional Homolog Of Ceres SEEDLINE ID no. ME06123 at SEQ ID NO. 94
MGTQVADNYPPAKDGRSAQEKAIDDWLPITSSRNAKWWYSAFHNVTAMVGAGVLSLPYAMSELGWGPGIAVLILSWIITLYTLWQMVEMHEMVPGKRFDRYHELGQHAFGEKLGLWIVVPQQLVVEVGVNIVYMVTGGKSLKKFHDVLCEGHGCKNIKLTYFIMIFASVHFVLSQLPNFNSISGVSLAAAVMSLSYSTIAWGASVDKGKVADVDYHLRATTSTGKVFGFFSALGDVAFAYAGHNVVLEIQATIPSTPEKPSKKPMWKGVVVAYIIVALCYFPVALVGYWAFGNHVDDNILITLSRPKWLIALANMMVVIHVIGSYQIYAMPVFDMIETVLVKKLRFPPGLTLRLIARTLYVAFTMFIAITFPFFGGLLGFFGGFAFAPTTYFLPCIMWLAIYKPRRFSLSWFTNWICIILGVMLMILSPIGGLRQIIIDAKTYKFYS

SEQ ID NO: 265 - DNA, 1695 bp, Triticum aestivum
  misc_feature: Ceres CLONE ID no.684177
  misc_feature: Encodes the peptide sequence at SEQ ID NO 266
atatctctctctttcgctctctctctctgcacatcctcctctcgcacatctccctctgtttactctccattgctcaaggcaaggccggccggcagaacatggggacgcaggcagcggagaacttcgaaccgccggccaaggatgtcaggacggatgagcagaagaagatcgacgactggctcccgatcacgtcgtcgaggaacgccaagtggtggtactcggccttccacaatgtcaccgccatggtgggcgcgggggtgctcagcctcccctacgccatgtccgagctcggctggggccctggcatcgcggtgctgatcatctcgtgggtgatcacgctctacacgctgtggcagatggtggagatgcacgagatggtgcccgggaagcggttcgacaggtaccacgagctcgggcagcacgccttcggcgacaagctggggctgtggatcgtggtgccgcagcagctgatcgtggaggtgggcgtaaacatcgtgtacatggtgaccggcgggaggtcgctcaagaagttccacgacgtgatctgcgacggcaagtgcaaggacatcaagctcaccttcttcatcatgatcttcgcgtcggtgcacttcgtgctctcgcagctcccaaacttgaactccatctccggcgtgtccctggccgccgccgtcatgtcgctgtcctactcgaccatcgcgtggggcgcgtcggtggacaaggggaagatggtggacgtggactacaacctccgcgccaccacgacgccggggaaggtgttcggcttcttcggggcgctgggcgaggtggcgttcgcgtacgccggccacaacgtggtgctggagatccaggccaccatcccgtccacgccggagaagccgtccaagaagcccatgtggaagggcgtggtggtggcctacatcgtcgtcgcgctctgctacttccccgtcgccctcatcggctactgggccttcggcaacagcgtcgacgacaacatcctcatcaccctcaacaagcccacctggctcatcgccaccgccaacatgatggttgtcatccatgtcatcggaagctaccagatttacgcgatgccggtgttcgacatgatcgagacggtgctggtgaagaagctcaagttccctcccggcctcacgctccgcttgattgcccggaccctctatgttgcgttcaccatgttcgtcgccatcaccttccctttcttcggtggcctgctcggattcttcggcgggttcgcctttgcgccgaccacatacttcctcccctgtatcatgtggctcgccatctacaagcccaaaagattcagcctctcatggttcaccaactgggtctgcatcgtccttggggtgtgcctgatgatcctgtcgccaatcggagggctcagacagatcatcttggattccaagacatacaagttctactcatagacttcatccacgacgcattttgtgtagtgaaaactgcaagagatcttttacgatgtctactacaaactctcttgtcttgcaaaggaaaaaagaaaggaacatcatagtaccacggttacagatgggatggtacttggtagatgcatatggtcagagaaaacttggtttagtcaaagcaaaagggttgtgtttgtggttaatcatgtacgtaatatatatggtgtgtggatttgacacaaaaaaaaaaaaaaaa

SEQ ID NO: 266 - protein, 447 aa, Triticum aestivum
  misc_feature: Ceres CLONE ID no.684177
  misc_feature: Score of 295.1 for HMM of FIGURE 5.
  misc_feature (34)..(434): Pfam Name: Aa_trans Pfam Description: Transmembrane amino acid transporter protein
  misc_feature (34)..(434): Pfam Name: Aa_trans Pfam Description: Transmembrane amino acid transporter protein
  misc_feature: Functional Homolog Of Ceres SEEDLINE ID no. ME06123 at SEQ ID NO. 94
MGTQAAENFEPPAKDVRTDEQKKIDDWLPITSSRNAKWWYSAFHNVTAMVGAGVLSLPYAMSELGWGPGIAVLIISWVITLYTLWQMVEMHEMVPGKRFDRYHELGQHAFGDKLGLWIVVPQQLIVEVGVNIVYMVTGGRSLKKFHDVICDGKCKDIKLTFFIMIFASVHFVLSQLPNLNSISGVSLAAAVMSLSYSTIAWGASVDKGKMVDVDYNLRATTTPGKVFGFFGALGEVAFAYAGHNVVLEIQATIPSTPEKPSKKPMWKGVVVAYIVVALCYFPVALIGYWAFGNSVDDNILITLNKPTWLIATANMMVVIHVIGSYQIYAMPVFDMIETVLVKKLKFPPGLTLRLIARTLYVAFTMFVAITFPFFGGLLGFFGGFAFAPTTYFLPCIMWLAIYKPKRFSLSWFTNWVCIVLGVCLMILSPIGGLRQIILDSKTYKFYS

SEQ ID NO: 267 - protein, 441 aa, Oryza sativa subsp. indica
  misc_feature: Public GI ID no.30409136
  misc_feature: Score of 286.6 for HMM of FIGURE 5.
  misc_feature (27)..(428): Pfam Name: Aa_trans Pfam Description: Transmembrane amino acid transporter protein
  misc_feature: Functional Homolog Of Ceres SEEDLINE ID no. ME06123 at SEQ ID NO. 94
MAKQWWQDGRSAQEKAIDDWLPITSSRNAKWWYSAFHNVTAMVGAGVLSLPYAMSELGWGPGIAVLILSWIITLYTLWQMVEMHEMVPGKRFDRYHELGQHAFGEKLGLWIVVPQQLVVEVGVNIVYMVTGGKSLKKFHDVLCEGHGCKNIKLTYFIMIFASVHFVLSQLPNFNSISGVSLAAAVMSLSYSTIAWGASVDKGKVADVDYHLRATTSTGKVFGFFSALGDVAFAYAGHNVVLEIQATIPSTPEKPSKKPMWKGVVVAYIIVALCYFPVALVGYWAFGNHVDDNILITLSRPKWLIALANMMVVIHVIGSYQIYAMPVFDMIETVLVKKLRFPPGLTLRLIARTLYVAFTMFIAITFPFFGGLLGFFGGFAFAPTTYFLPCIMWLAIYKPRRFSLSWFTNWICIILGVMLMILSPIGGLRQIIIDAKTYKFYS

SEQ ID NO: 268 - DNA, 1776 bp, Gossypium hirsutum
  misc_feature: Ceres CLONE ID no.1952071
  misc_feature: Encodes the peptide sequence at SEQ ID NO 269
actgggaacaaatataaaggcgacccagaatgctccattattccttcttttcagtttcaggtgcacagtgaaacacaaggctttcactttttgcattttcaaatgatggatgagcggcctgagacagagttgatatccattccagcaacgccgcgagtgtcaacaccggagatacaaacgccgtcggggcagaggtcgccgaggccagccgggcagaagtcgtcgacagcatggactccaacgtcgtttatatctcccaggtttttgagtccgatagggactccaatgaagaaggttttgatcaatatgaaaggttacttggaagaagtgggtcatctcactaagcttaaccctcaagatgcttggcttcccatcactgaatcacgcaatgggaacgctattacgccgcgtttcataacctgaatgctggggttgggttccaagctttggtcttgcctgttgcttttgcttttctaggctggagttggggtatattgtcgttaactattgcctactgttggcaactttacaccttatggattctggttcagttgcatgaagctgtcccaggaaagagatacaatagatatgtggagctcgcacaagctgcttttggagaaagattaggtgtttggcttgctctcttccctacagtttatttatcagcgggaactgcgacagctttgattctcataggaggggagaccatgaaactgttcttccaggttgtctgtggtcctctctgttcatcaaatcctctgacgacggttgagtggtatctggtgttcacgtcattgtgcattgtcctgtctcagctccccaatcttaattcaattgcagggctctctcttgtaggagccatcacagccatcacttactccactatggtgtgggtgctctctgttagccaacaaaggccacccacaatctcttatgaacctctctcactgccatcctcttctgcagctctcttctcagtcatgaatgcacttggaatcgtagccttcgcattcagaggccataatttagttttagagatccaggcaacaatgccatcaacattcaaaaatccagctcatgtgcccatgtggagaggagccaaggttgcttatttcttcattgccatgtgccttttccctgttgccattggaggcttttgggcttacggaaaccttatgccttcaggagggattctgaatgcactttatgcatttcacagtcacagcattccaaggggactccttgccctcacttttcttcttgtggtattcaactgtctcagcagtttccaaatatattcaatgccggctttcgacagctttgaggctggatatactagccgtacgaatcgcccttgctcgatctgggttcgttctggttttcgtgttttctacggatttgtgtccttcttcataggggtggcactcccattcctttcaagccttgctggactgttaggaggactcacccttccagttacatttgcttatccttgtttcatgtgggttctaataaaaaggcctccgaaatacagcttcaactggtacttcaattggatcctgggttggttgggtgttgccttcagcctggccttctctattggtggcatttggagcatagtgaacaatggactcaagttgaagttcttcaagcccaattaagaagaaaaaaaaaaagacacttccttatatatataaaatctatatatgtactattgtgatgcaaagttcaaatcgaatgatatatagtttcctccaaaaaaaaaaaaaaaaaaaa

SEQ ID NO: 269 - protein, 317 aa, Gossypium hirsutum
  misc_feature: Ceres CLONE ID no.1952071
  misc_feature: Score of 370.4 for HMM of FIGURE 5.
  misc_feature (23)..(306): Pfam Name: Aa_trans Pfam Description: Transmembrane amino acid transporter protein
  misc_feature: Functional Homolog Of Ceres SEEDLINE ID no. ME06123 at SEQ ID NO. 94
MKLFFQVVCGPLCSSNPLTTVEWYLVFTSLCIVLSQLPNLNSIAGLSLVGAITAITYSTMVWVLSVSQQRPPTISYEPLSLPSSSAALFSVMNALGIVAFAFRGHNLVLEIQATMPSTFKNPAHVPMWRGAKVAYFFIAMCLFPVAIGGFWAYGNLMPSGGILNALYAFHSHSIPRGLLALTFLLVVFNCLSSFQIYSMPAFDSFEAGYTSRTNRPCSIWVRSGFRVFYGFVSFFIGVALPFLSSLAGLLGGLTLPVTFAYPCFMWVLIKRPPKYSFNWYFNWILGWLGVAFSLAFSIGGIWSIVNNGLKLKFFKPN

SEQ ID NO: 270 - protein, 444 aa, Oryza sativa subsp. indica
  misc_feature: Public GI ID no.125536241
  misc_feature: Score of 247.5 for HMM of FIGURE 5.
  misc_feature (27)..(431): Pfam Name: Aa_trans Pfam Description: Transmembrane amino acid transporter protein
  misc_feature: Functional Homolog Of Ceres SEEDLINE ID no. ME06123 at SEQ ID NO. 94
MAPPSAMNTSRAEEKAIDDWLPITSSRNAKWWYSAFHNVTAMVGAGVLSLPFAMSELGWGPGVAAMIMSWVITLYTLWQMVEMHECVPGRRFDRYHELGQHAFGDKLGLWIVVPQQLVVEVGVCIVYMVTGGKSLKKFHDLVAPPSAPPIRTSYFIVIFGCLHLVLSQLPNFNSITGVSLAAAVMSLSYSTIAWAASLHHRNHNNGAAAVDYSLTAATPAGRTFNFLSALGDVAFAYAGHNVVLEIQATIPSTPERPSKGPMWRGVVLAYGVVAVCYLPVAFAGYYVFGNAVDDNVLITLERPAWLIAAANMFVVVHVVGSYQIYAMPVFDMLETFLVKKLRFKPGMPLRLIARSLYVLFTMFVAIAVPFFGGLLGFFGGFAFAPTTYFLPCIMWLSIMKPKRFGLSWCINWFCIIIGVLLSVFAPIGGLRSIIVNAQSYKFFS

SEQ ID NO: 271 - protein, 453 aa, Arabidopsis thaliana
  misc_feature: Public GI ID no.22330117
  misc_feature: Score of 251.0 for HMM of FIGURE 5.
  misc_feature (41)..(440): Pfam Name: Aa_trans Pfam Description: Transmembrane amino acid transporter protein
  misc_feature: Functional Homolog Of Ceres SEEDLINE ID no. ME06123 at SEQ ID NO. 94
MYIQMTDGVPPPPEQSSLDHRIDELERQKEIDDWLPITSSRNAKWWYSTFHNVTAMVGAGVLGLPFFMAQLGWGPGIAVLILSWIITLYTLWQMVEMHEMVPGKRFDRYHELGQFAFGERLGLYIIVPQQIIVEVGVCIVYMVTGGQSLKKFHEIACQDCSPIRLSFFIMIFASSHFVLSHLPNFNSISGVSLVAAVMSLSYSTIAWTATAAKGVQEDVQYGYKSGTTASTVLSFFTGLGGIAFAYAGHNVVLEIQATIPSTPSNPSKGPMWRGVVVAYVVVALCYFPVALVGYGVFGNAVLDNVLMSLETPVWAIATANLFVVMHVIGSYQIFAMPVFDMVETFLVKKLNFKPSTVLRFIVRNVYVALTMFIGIMIPFFGGLLAFFGGFAFAPTSYFLPCIMWLLIYKPKRFSLSWWTNWVCIVLGVVLMILSSIGGLRQIIIQSKDYSFFS

SEQ ID NO: 272 - protein, 809 aa, Arabidopsis thaliana
  misc_feature: Public GI ID no.12597815
  misc_feature: Score of 258.5 for HMM of FIGURE 5.
  misc_feature (134)..(184): Pfam Name: Peroxin-3 Pfam Description: Peroxin-3
  misc_feature (397)..(796): Pfam Name: Aa_trans Pfam Description: Transmembrane amino acid transporter protein
  misc_feature: Functional Homolog Of Ceres SEEDLINE ID no. ME06123 at SEQ ID NO. 94
MGEGKMEHRRKVLVTAGCLGSGYLLYKLYNSHTRRLADLERELAHERENDEIIKTQLSSVLIKTDPLDFSSYGFSNGPVLFVLLFRMKAHFESIQMIVDSTTLPHAMQFLSIRISEEIDVSHVMDRLNQGKGMLSPPEKLQLWDELKILSFTRMVLSLWSVTMLSLYIRVQVNILGRHLYVDTARALGSSHLLEEVDLIDRDDEQKFLSSADFLVTNAMPSLISDMQGSAEEVLKGKQLKDVITTRVLQETVMQIVDVFMSTGSPHHWVDYLMMPQDTKLSRTTSDSSDEAVSKFHQLMVETREVLISTEFTNIVEISLKCFTDVLVEEMETQTEAGGLATGKPLAKVLPQIEKTMNVITAEPSKNRFLQIIRDLPEIDELERQKEIDDWLPITSSRNAKWWYSTFHNVTAMVGAGVLGLPFFMAQLGWGPGIAVLILSWIITLYTLWQMVEMHEMVPGKRFDRYHELGQFAFGERLGLYIIVPQQIIVEVGVCIVYMVTGGQSLKKFHEIACQDCSPIRLSFFIMIFASSHFVLSHLPNFNSISGVSLVAAVMSLSYSTIAWTATAAKGVQEDVQYGYKSGTTASTVLSFFTGLGGIAFAYAGHNVVLEIQATIPSTPSNPSKGPMWRGVVVAYVVVALCYFPVALVGYGVFGNAVLDNVLMSLETPVWAIATANLFVVMHVIGSYQIFAMPVFDMVETFLVKKLNFKPSTVLRFIVRNVYVALTMFIGIMIPFFGGLLAFFGGFAFAPTSYFLPCIMWLLIYKPKRFSLSWWTNWVCIVLGVVLMILSSIGGLRQIIIQSKDYSFFS

SEQ ID NO: 273 - protein, 446 aa, Oryza sativa subsp. japonica
  misc_feature: Public GI ID no.115488002
  misc_feature: Score of 248.8 for HMM of FIGURE 5.
  misc_feature (27)..(433): Pfam Name: Aa_trans Pfam Description: Transmembrane amino acid transporter protein
  misc_feature: Functional Homolog Of Ceres SEEDLINE ID no. ME06123 at SEQ ID NO. 94
MAPPSAMNTSRAEEKAIDDWLPITSSRNAKWWYSAFHNVTAMVGAGVLSLPFAMSELGWGPGVAAMIMSWVITLYTLWQMVEMHECVPGRRFDRYHELGQHAFGDKLGLWIVVPQQLVVEVGVCIVYMVTGGKSLKKFHDLVAPPSAPPIRTSYFIVIFGCLHLVLSQLPNFNSISGVSLAAAVMSLSYSTIAWAASLHHHNHNNGAAAGGVDYSLTEATPAGRTFNFLSALGDVAFAYAGHNVVLEIQATIPSTAERPSKGPMWRGVVLAYGVVAVCYLPVAFAGYYVFGNAVDDNVLITLERPAWLIAAANMFVVVHVVGSYQIYAMPVFDMLETFLVKKLRFKPGMPLRLIARSLYVLFTMFVAIAVPFFGGLLGFFGGFAFAPTTYFLPCIMWLSIMKPKRFGLSWCINWFCIIIGVLLSVFAPIGGLRSIIVNAQSYKFFS

SEQ ID NO: 274 - protein, 552 aa, Oryza sativa subsp. japonica
  misc_feature: Public GI ID no.125579355
  misc_feature: Score of 637.6 for HMM of FIGURE 5.
  misc_feature (418)..(540): Pfam Name: Aa_trans Pfam Description: Transmembrane amino acid transporter protein
  misc_feature: Functional Homolog Of Ceres SEEDLINE ID no. ME06123 at SEQ ID NO. 94
MAMAVEGAGAGVVVSEPEVVSIPPTPRGMSTPDGTATPPPAAGRGAATPARRVVEGLRGYLEEVGHLTRLNPQDAWLPITESRSGNARYAAFHTLNAGLGFQALLLPLAFPALGWSGTFPLLASSVSSSSLLLALAISLSFFLSFSFRCELMQMRCGFSEKCNSFTFGFTARMRSWGIISLTVAYFWQLYTLWILVKLHEAVPGRRYNRYVELAQAAFAQVIIASGYTKLRTCNVAKILSADLIHLTGEKLGMWLSLFPTIYLSAGSATALILVGGETMKLFYQIVCGPICSPSPISTIEWYLVFTSLAIVLSQLPNLNSIAGVSLIGGTTAITYCTMSWVLSVSQPQPPTVSYEPQAYTSLGSSLFSTLNALGIIAFAFRGHNLALEIQVPQGGMLTALYAFHSHDIPRGLLAATFLLVVFNCLSSFQIYSMPVFDSFEAAYTGRTNRPCSVWVRSGFRVFYGFLSLFISVALPFLSSLAGLLGGLTLPVTFAYPCFMWICIKKPERFSSGWYLNWGLGLLGTAFSLALCVGGVWSIISSGMKFKFFKPPS

SEQ ID NO: 275 - protein, 462 aa, Nicotiana sylvestris
  misc_feature: Public GI ID no.976402
  misc_feature: Score of 202.5 for HMM of FIGURE 5.
  misc_feature (32)..(435): Pfam Name: Aa_trans Pfam Description: Transmembrane amino acid transporter protein
  misc_feature: Functional Homolog Of Ceres SEEDLINE ID no. ME06123 at SEQ ID NO. 94
MVASPDNNAADGRTVKNKRPIDEWLPITSSRNGQNGGYSAFHNVTAMVGAGVLGLPYAMSELGWGPGVTVMVVSWVITLYTLWQMVECKKCPGMLAGTCIDDHKLAVSNVFGNKLGLWIVVPQQLVVEVGIDIVYMVTGGKSFQKSIVLVCKDNCKDIKLTYYIMIFASVHFVLSHLPNFNAISGVSLVAAIMSLSYCTIAWGASIVLGVQPDVEYEYRAENTGEGIFNFFSGLGEVAFAYAGHNVVLEIQATIPSTPEKPSKGPMWKGVLVAYIIVALCYFPVAIIGYWIFGNSVSNNILISLEKPTWLIVLANAFVVITLLGAYQLYAIPVFDMLETYLVRKLKFKPTWYLRFMTRNLYVAFTMFVGIIFPFLWGLLGFLGGFAFAPTTYFLPCIMWLSIYKPKRWGLSWTSNWICIIVGVMLTVLAPIGGLRTIIIQAKDYNFFYWDSLSGSLAFGKKG

SEQ ID NO: 276 - DNA, 1350 bp, Populus balsamifera subsp. trichocarpa
  misc_feature: Ceres ANNOT ID no.1493584
  misc_feature: Encodes the peptide sequence at SEQ ID NO 277
atgggtactcaagttcctgataatcaaaaacctgatgtccccgaggaattatcagaagcagatagaaggaagaaagagattgatgattggcttccaatcacttcctcgagaaatgcaaaatggtggtattcagctttccacaatgttacggccatggttggagctggtgtcctcagtcttccatatgcaatggcaaatcttggatggggccctggtaccgtaattcttgtgctctcatggaccatcactttgtacaccctatggcaaatggttgagatgcatgagatggttcctgggaaacgatttgaccgataccatgagcttggccagcatgcctttggtgaaaaacttggtctttacatagtagtgccccagcagcttatttgtgaagtaggggttgacatagtctacatggttactggaggaaaatcacttcagaagatccacaatttagtgtgcaaagactgtgcaccgatcaaattaacctactttatcatgattttcgcctcggttcatttcgtgctttctcatcttcccaactttaactccatctctggtgtttcactggctgctgcagtcatgtctttgagttactctaccattgcatggtcagcttctgtccacaaaggtgttcagccagatgtcgactatggctacaaagcctcgacaacttctggaacggtcttcaatttcttttctgccttgggcgatgtagcttttgcctatgctgggcacaacgttgtgttagagattcaagcaacaattccatctaaaccaggcaagccatcgaaagggccaatgtggaaaggagtggtggttgcctatatagttgtagcattgtgctacttcccagttgctctgatagggtattacatgttcggtaataaagtcgaagataacatactcatatcgttagaaaaaccaacatggctcatcgtagcagctaacatgttcgtcgttatccacgttatcggaagctatcagatatatgcaattccagtatttgacatgctagaaacattgctggtaaagaagttgcatttcaggccttccagaaagcttcgattcattacacgcaatatatatgttgcgtttacaatgttcgttggcatctgcttccctttctttggtggtcttctgggattcttcggaggatttgcttttgccccaacaacttactttctaccttgtatcatgtggctggccatctacaaaccaaagaggttcagcttatcatggatcaccaactggatctgcattatacttggctttttattgatgattttgtcacctattggagggttgcggactatcatactaaatgccaagggctacaaatttttctcttga

SEQ ID NO: 277 - protein, 449 aa, Populus balsamifera subsp. trichocarpa
  misc_feature: Ceres ANNOT ID no.1493584
  misc_feature: Score of 239.0 for HMM of FIGURE 5.
  misc_feature (37)..(436): Pfam Name: Aa_trans Pfam Description: Transmembrane amino acid transporter protein
  misc_feature: Functional Homolog Of Ceres SEEDLINE ID no. ME06123 at SEQ ID NO. 94
MGTQVPDNQKPDVPEELSEADRRKKEIDDWLPITSSRNAKWWYSAFHNVTAMVGAGVLSLPYAMANLGWGPGTVILVLSWTITLYTLWQMVEMHEMVPGKRFDRYHELGQHAFGEKLGLYIVVPQQLICEVGVDIVYMVTGGKSLQKIHNLVCKDCAPIKLTYFIMIFASVHFVLSHLPNFNSISGVSLAAAVMSLSYSTIAWSASVHKGVQPDVDYGYKASTTSGTVFNFFSALGDVAFAYAGHNVVLEIQATIPSKPGKPSKGPMWKGVVVAYIVVALCYFPVALIGYYMFGNKVEDNILISLEKPTWLIVAANMFVVIHVIGSYQIYAIPVFDMLETLLVKKLHFRPSRKLRFITRNIYVAFTMFVGICFPFFGGLLGFFGGFAFAPTTYFLPCIMWLAIYKPKRFSLSWITNWICIILGFLLMILSPIGGLRTIILNAKGYKFFS

SEQ ID NO: 278 - DNA, 2007 bp, Zea mays
  misc_feature: Ceres CLONE ID no.1571117
  misc_feature: Encodes the peptide sequence at SEQ ID NO 279
aactatgacccctgctgcctttccatcttcctcgatctccctagctcgctctccaatctcccatttctctctctctctctctcgtcttcgccatccaccatccatcccgtcgtcgtgatagatggcggcagtccagccgtccgtggagatgacgacgcagcaagggccgccagccgccagctattctccggccagggatggcggcggcggcaggagcgccgaggatgaggagaaggagaaggcggcggcgatcgacaactggcttcccatcagcgcgacgcggaatgccaagtggtggtactccgccttccacaacgtcacggccatggtcggcgccggcgtgctcggcctcccctacgccatgtcccagctcggctggggtgccggcatcacgatcatgctcctgtcgtgggtgatcacgctgtacacgctgtggcagatggtggagatgcacgagatggtgccggggaagcggttcgaccggtaccacgagctggggcagcacgcgttcggggaccgcctgggcctgtggatcgtggtgccgcagcagctggtcgtcgaggtgggggtgaacatcgtgtacatggtgaccggcggcacgtcgctgcagaagttccacgacgtgctggtgtgcggcgacgcggcgtgcgagggcgggcgcaagatcaggctcacctacttcatcatgatcttcgcgtcctgccacttcgtgctggcgcagctgcccaacttcgactccatctccggcgtgtccctggccgccgccgtcatgtcgctcagctactccaccatcgcgtggggcgcgtccgtgagcaaagggcgggtccccgacgtggactacggcctcagggccaccacgccgccgggcaaggtgttcgggttcctgggcgcgctcgggaccgtggcgttcgcctacgcgggccacaacgtggtgctggagatccaggccactatcccgtccactcccgagaagccgtccaagaagcccatgtggaagggcgtcgtcgtcgcctacctcgtcgtcgcgctctgctacttccccgtctcgttcgtcggctactgggccttcggcgacagcgtcgacggcgacatcctcgtcacccttaacagacccaggtggctcatcgccctcgccaacatgatggtcgtcatccatgtcattggcagctaccagatctatgcgatgcccgtgttcgacatgatagagacggtgctggtgaagaagctgcgcttccctccaggcctcacgctccgtctcattgcccgtactgtctacgttgcgttcacaatgttcatagccatcacgtttcccttcttcgacgggctgctcagcttcttcggcggattcgcgttcgcgcccacaacctatttccttccatgcatcatgtggctcgcaatctacaagcccaaacggttcagcctctcatggttcaccaactggatctgcatcatccttggagtgcttctgatggtgctggcgccgattggagggctccggcagatcattatcagcgccaagacatacaagttttaccagtaaacattgcacaattatcgtgcaaaaaacaacgcaaaccccttgcttcaccagtaactgacagacaagtcttgttaggccatatataccatgttacgatcagctgacacaggttctggattttgttccatgagggcttccaactccttgtttaatttggcacgacaaaaagctcgcaccgggtgctctaatcggcggccgattacagcgtccagtgcgagttctttgccgtgccaaaattgaaagggggtcggctcggatgccggggcatgcatacaggacctagaacccgtttcggttgatgagaatgttcctggcatgtaatgcttcccttgttggttgtggtctaacctaggagtttgctttgagtggatctttgtacaattgtacgtgtatatgatgtttttttcccttcttcatacttgtttacattattcaggggaattggatcttaaaaaaaaaaaaaaaaa

SEQ ID NO: 279 - protein, 463 aa, Zea mays
  misc_feature: Ceres CLONE ID no.1571117
  misc_feature: Score of 267.2 for HMM of FIGURE 5.
  misc_feature (45)..(450): Pfam Name: Aa_trans Pfam Description: Transmembrane amino acid transporter protein
  misc_feature: Functional Homolog Of Ceres SEEDLINE ID no. ME06123 at SEQ ID NO. 94
MTTQQGPPAASYSPARDGGGGRSAEDEEKEKAAAIDNWLPISATRNAKWWYSAFHNVTAMVGAGVLGLPYAMSQLGWGAGITIMLLSWVITLYTLWQMVEMHEMVPGKRFDRYHELGQHAFGDRLGLWIVVPQQLVVEVGVNIVYMVTGGTSLQKFHDVLVCGDAACEGGRKIRLTYFIMIFASCHFVLAQLPNFDSISGVSLAAAVMSLSYSTIAWGASVSKGRVPDVDYGLRATTPPGKVFGFLGALGTVAFAYAGHNVVLEIQATIPSTPEKPSKKPMWKGVVVAYLVVALCYFPVSFVGYWAFGDSVDGDILVTLNRPRWLIALANMMVVIHVIGSYQIYAMPVFDMIETVLVKKLRFPPGLTLRLIARTVYVAFTMFIAITFPFFDGLLSFFGGFAFAPTTYFLPCIMWLAIYKPKRFSLSWFTNWICIILGVLLMVLAPIGGLRQIIISAKTYKFYQ

SEQ ID NO: 280 - DNA, 1685 bp, Triticum aestivum
  misc_feature: Ceres CLONE ID no.786667
  misc_feature: Encodes the peptide sequence at SEQ ID NO 281
gctataggttcattccctcgggaatatacggcggcacttgactagtatctatccatccgtctcctctgaggtacctcgagagatcccgttcgccggagcggagatccgatcggaccggatcggatcgcgtcgccatggccatgaacacgagcaaggcggcgacgtcggacaagcagctgcaggacatcgacgactggctgcccatcacctcctcccggaacgccaagtggtggtactcggccttccacaatgtcaccgccatggtcggcgccggcgtcctcagcctgccctacgccatgtccgagctcggatggggtcctggcgtggcggcgatgatcctctcatgggcgatcacgctgtacacgctgtggcagatggtggagatgcacgagtgcgtgcccggcaagcgcttcgaccgctaccacgagctgggccagcacgccttcggccagaagctgggactctggatcgtcgtcccgcaacagctcgtcgtcgaggtcggcgtctgcatcgtctacatggtcaccggcggcaagtcgctcaagaaggtccacgacctgctccgcccggagcacagccacccgatccggaccagctacttcatctgcatcttcggctccgcccacttcctcctctcccagctgcccaacttcaactccatcaccggcgtctccctcgccgccgctgtcatgtcgctcagctactccaccatcgcctgggcggcctcgctgcacaaagccggcaaggccgggcccggccatgtggttgactacagcatgacggcgtcgacgacccccggaaagaccttcaacttcctgagcgcgctcggggacgtggccttcgcctacgccggtcacaacgtggtgctggagatccaggccaccatcccctccaccccagagaagccgtccaagaagcccatgtggcggggcgtcgttctcgcctacatcgtcgtcgccatctgctacctccccgtcgccttcctcggctactatgtcttcggcaacgccgtcgacgacaacatcctcatcaccctcgagaagccccgctggctcatcgccgccgccaacatgttcgtcgtcatccacgtcatcggcagctaccagatctatgcaatgccggtcttcgacatgctcgagaccttcctggtgaagaagctaaggtttaagcccgggtggccacttcgtctcatcgcacgctcgctctacgttgcattcaccatgctcgtcggcatcgccatccccttcttcggtgggctactaggcttctttggtggttttgcatttgccccaacaacctacttccttccctgcattatgtggctggcaatcaagaagccagcgaggttcagcatgtcctggtgcatcaactggatatgcataatcatcggcgtgcttctgtctgtgttggcgcccatcggaggcctccgttccatcatcatcaactacaagacctaccaattcttctcatgatctgctgcaaacgtgcatgcagcagtccagctagctacttagatgcagcgtattatatgcatagtgtgtgttaccttgtcatgtttaaattaggccaaagaaatattcgtgtgtttgtggatgttgctcgatcgctttgtgatattgaaatcaatgcctaagtggaggcgttctcttagatatatatgtgaaatgccaaaaaaaaaaaaaaaa

SEQ ID NO: 281 - protein, 445 aa, Triticum aestivum
  misc_feature: Ceres CLONE ID no.786667
  misc_feature: Score of 248.7 for HMM of FIGURE 5.
  misc_feature (28)..(432): Pfam Name: Aa_trans Pfam Description: Transmembrane amino acid transporter protein
  misc_feature: Functional Homolog Of Ceres SEEDLINE ID no. ME06123 at SEQ ID NO. 94
MAMNTSKAATSDKQLQDIDDWLPITSSRNAKWWYSAFHNVTAMVGAGVLSLPYAMSELGWGPGVAAMILSWAITLYTLWQMVEMHECVPGKRFDRYHELGQHAFGQKLGLWIVVPQQLVVEVGVCIVYMVTGGKSLKKVHDLLRPEHSHPIRTSYFICIFGSAHFLLSQLPNFNSITGVSLAAAVMSLSYSTIAWAASLHKAGKAGPGHVVDYSMTASTTPGKTFNFLSALGDVAFAYAGHNVVLEIQATIPSTPEKPSKKPMWRGVVLAYIVVAICYLPVAFLGYYVFGNAVDDNILITLEKPRWLIAAANMFVVIHVIGSYQIYAMPVFDMLETFLVKKLRFKPGWPLRLIARSLYVAFTMLVGIAIPFFGGLLGFFGGFAFAPTTYFLPCIMWLAIKKPARFSMSWCINWICIIIGVLLSVLAPIGGLRSIIINYKTYQFFS

SEQ ID NO: 282 - protein, 451 aa, Arabidopsis thaliana
  misc_feature: Public GI ID no.15219896
  misc_feature: Score of 231.8 for HMM of FIGURE 5.
  misc_feature (34)..(435): Pfam Name: Aa_trans Pfam Description: Transmembrane amino acid transporter protein
  misc_feature: Functional Homolog Of Ceres SEEDLINE ID no. ME06123 at SEQ ID NO. 94
MKGIPSSSNQILNQDLVEDQSFELEDWLPITASRNANWYYSAFHNVTAIVGAGVLGLPYAMSELGWGPGVVVLILSWVITLYTFWQMIEMHEMFEGKRFDRYHELGQAAFGKKLGLYIVVPLQLLVETSACIVYMVTGGESLKKIHQLSVGDYECRKLKVRHFILIFASSQFVLSLLKNFNSISGVSLVAAVMSMSYSTIAWVASLTKGVANNVEYGYKRRNNTSVPLAFLGALGEMAFAYAGHNVVLEIQATIPSTPENPSKRPMWKGAIVAYIIVAFCYFPVALVGFWTFGNNVEENILKTLRGPKGLIIVANIFVIIHLMGSYQVYAMPVFDMIESVMIKKWHFSPTRVLRFTIRWTFVAATMGIAVALPHFSALLSFFGGFIFAPTTYFIPCIIWLILKKPKRFSLSWCINWICIILGVLVMIIAPIGGLAKLMNALKQPDSSCKST

SEQ ID NO: 283 - DNA, 1748 bp, Triticum aestivum
  misc_feature: Ceres CLONE ID no.914964
  misc_feature: Encodes the peptide sequence at SEQ ID NO 284
acctgcgagctccatctccatctccttgtttctctccaccttctccttggtgtgactccggccgcccattggcgaagggaagctccgtgccgccggaagagaagccaggcgccatggggacgcaggcctcgccggacaactacacgccgcccaaggatgagaggactgcacgggagaaggcgatcgatgactggcttcctatcacgtcgtcgaggaaagcaaagtggtggtactcggccttccacaatgtcaccgccatggttggcgctggggtgctcagcctcccctacgccatgtctgaactcggttggggtcctggcatcgcggtgatgaccttgtcgtggatcatcacggtgtacacgctgtggcagatggtggagatgcatgagatagtccctgggaagcgtttcgatcggtaccatgagctcgggcagcacgccttcggtgataagctcggcctctggatcgtggtgccacagcagcttgtcgtcgaggtcagcttgaacattgtgtacatggttaccggcggcaactctctcaagaagttccacgacgtgatctgtgacggcaagtgcaaggacataaagctcacttacttcatcatgatcttcgcctctgtccacttcgtcctctcccagctcccaaacttcaactccatctctggcatctccctcgctgcagccgtcatgtcactcagctactcaacaattgcttggggcgcctcgttggacaaggggagggcggagaacgtggactacagcctgcgggcatcgacgacagcagggcaggtgttcggtttcttgggggggctcggcgacgtggccttctcctactctggccacaatgtcgtgctagaaatccaggctaccatcccatcgacgccgggcaacccgtccaagaagccaatgtggaagggtgtggtggtcgcctacatcatcatcgccgcctgctacatgccggtggcatttatcggctactgggcgtttggcaacagtgtcgacgacaacatcctcatcaccctcaacaagcccaagtggctcatcgccatggccaacatgatggtcgtcgttcatctcatcggtagctaccagatttacgcgatgccagtgttcgacatgatggagacgtttctggtgaggaagctggaattcgcaccaggcattatgctccgtctgatcacccggaccatctatgttgccttcaccatgttcgtcggcatgaccttcccgttcttcggtggcctcatcgggttcttcggcgggctggccttcgcgccgacgacctatttcctgccctgcatcatgtggctcatcatctgcaagcccaggagattcagcctctcatggttcaccaactggatttgcatcgtccttggtgtcattctgatgatcatcgcgcccatcggagggctcaggcagatcatcatttctgccaagacatacaagttctactcatagatcactacaagtgccgttcatcatcatcgcctcgcgattggcgattctactgccagatttttatttttattttctgtccctgcaaagaagaaagatcatggtatcacggcttgtcgcagatgtcggacggtctgcttagtttagaccggaggagggctgtgttgggggtaaatcgtgaaggggtccagcccgcttgcagcgccgggagttttcatgtatgtactcgtattattttgcagagcactagctatgaaaataggcgcaaggattcatataaaaaaaaaaaaaaaa

SEQ ID NO: 284 - protein, 447 aa, Triticum aestivum
  misc_feature: Ceres CLONE ID no.914964
  misc_feature: Score of 265.4 for HMM of FIGURE 5.
  misc_feature (34)..(434): Pfam Name: Aa_trans Pfam Description: Transmembrane amino acid transporter protein
  misc_feature: Functional Homolog Of Ceres SEEDLINE ID no. ME06123 at SEQ ID NO. 94
MGTQASPDNYTPPKDERTAREKAIDDWLPITSSRKAKWWYSAFHNVTAMVGAGVLSLPYAMSELGWGPGIAVMTLSWIITVYTLWQMVEMHEIVPGKRFDRYHELGQHAFGDKLGLWIVVPQQLVVEVSLNIVYMVTGGNSLKKFHDVICDGKCKDIKLTYFIMIFASVHFVLSQLPNFNSISGISLAAAVMSLSYSTIAWGASLDKGRAENVDYSLRASTTAGQVFGFLGGLGDVAFSYSGHNVVLEIQATIPSTPGNPSKKPMWKGVVVAYIIIAACYMPVAFIGYWAFGNSVDDNILITLNKPKWLIAMANMMVVVHLIGSYQIYAMPVFDMMETFLVRKLEFAPGIMLRLITRTIYVAFTMFVGMTFPFFGGLIGFFGGLAFAPTTYFLPCIMWLIICKPRRFSLSWFTNWICIVLGVILMIIAPIGGLRQIIISAKTYKFYS

SEQ ID NO: 285 - DNA, 1539 bp, Populus balsamifera subsp. trichocarpa
  misc_feature: Ceres ANNOT ID no.1440705
  misc_feature: Encodes the peptide sequence at SEQ ID NO 286
atgggtactcaagttcctgataatcaaaaacctgatgtccccgaggaattatcagaagcagatagaaggaagaaagagattgatgattggcttccaatcacttcctcgagaaatgcaaaatggtggtattcagctttccacaatgttacggccatggttggagctggtgtcctcagtcttccatatgcaatggcaaatcttggatggggccctggtaccgtaattcttgtgctctcatggaccatcactttgtacaccctatggcaaatggttgagatgcatgagatggttcctgggaaacgatttgaccgataccatgagcttggccagcatgcctttggtgaaaaacttggtctttacatagtagtgccccagcagcttatttgtgaagtaggggttgacatagtctacatggttactggaggaaaatcacttcagaagatccacaatttagtgtgcaaagactgtgcaccgatcaaattaacctactttatcatgattttcgcctcggttcatttcgtgctttctcatcttcccaactttaactccatctctggtgtttcactggctgctgcagtcatgtctttgagttactctaccattgcatggtcagcttctgtccacaaaggtgttcagccagatgtcgactatggctacaaagcctcgacaacttctggaacggtcttcaatttcttttctgccttgggcgatgtagcttttgcctatgctgggcacaacgttgtgttagagattcaagcaacaattccatctaaaccaggcaagccatcgaaagggccaatgtggaaaggagtggtggttgcctatatagttgtagcattgtgctacttcccagttgctctgatagggtattacatgttcggtaataaagtcgaagataacatactcatatcgttagaaaaaccaacatggctcatcgtagcagctaacatgttcgtcgttatccacgttatcggaagctatcagatatatgcaattccagtatttgacatgctagaaacattgctggtaaagaagttgcatttcaggccttccagaaagcttcgattcattacacgcaatatatatgttgcgtttacaatgttcgttggcatctgcttccctttctttggtggtcttctgggattcttcggaggatttgcttttgccccaacaacttactttctaccttgtatcatgtggctggccatctacaaaccaaagaggttcagcttatcatggatcaccaactggtgtctggatttgaggactaaccttgtctcggattctttgtttcctatgaaacgccatggaaggaattctggagtcactttaatatcatcaacattttgcataggtcttggaggtcatgattcctcgctgtcattctcacaactcatctctcgtggttttggaagagcttactcgtgcaatgtagacatcttagttcgatttccactctacaatttctctgaaccatgcttcaagattgttgtatggtatagggaattttctcaccaaaagctactgttgaagagttaa

SEQ ID NO: 286 - protein, 512 aa, Populus balsamifera subsp. trichocarpa
  misc_feature: Ceres ANNOT ID no.1440705
  misc_feature: Score of 234.4 for HMM of FIGURE 5.
  misc_feature (37)..(413): Pfam Name: Aa_trans Pfam Description: Transmembrane amino acid transporter protein
  misc_feature (37)..(431): Pfam Name: Aa_trans Pfam Description: Transmembrane amino acid transporter protein
  misc_feature: Functional Homolog Of Ceres SEEDLINE ID no. ME06123 at SEQ ID NO. 94
MGTQVPDNQKPDVPEELSEADRRKKEIDDWLPITSSRNAKWWYSAFHNVTAMVGAGVLSLPYAMANLGWGPGTVILVLSWTITLYTLWQMVEMHEMVPGKRFDRYHELGQHAFGEKLGLYIVVPQQLICEVGVDIVYMVTGGKSLQKIHNLVCKDCAPIKLTYFIMIFASVHFVLSHLPNFNSISGVSLAAAVMSLSYSTIAWSASVHKGVQPDVDYGYKASTTSGTVFNFFSALGDVAFAYAGHNVVLEIQATIPSKPGKPSKGPMWKGVVVAYIVVALCYFPVALIGYYMFGNKVEDNILISLEKPTWLIVAANMFVVIHVIGSYQIYAIPVFDMLETLLVKKLHFRPSRKLRFITRNIYVAFTMFVGICFPFFGGLLGFFGGFAFAPTTYFLPCIMWLAIYKPKRFSLSWITNWCLDLRTNLVSDSLFPMKRHGRNSGVTLISSTFCIGLGGHDSSLSFSQLISRGFGRAYSCNVDILVRFPLYNFSEPCFKIVVWYREFSHQKLLLKS

SEQ ID NO: 287 - DNA, 1600 bp, Zea mays
  misc_feature: Ceres CLONE ID no.264227
  misc_feature: Encodes the peptide sequence at SEQ ID NO 288
ccgggctactccaaaatatccagctttttcctgcggcaaactacctggccgccatctcctccgatccctcggcatacgtctccatcggccgggcgaccgagatggcgacgccctccagcatgacgtcgacggagaaggagaaagccatcgacgactggctgcccatcacctcgtccaggaacgccaaatggtggtactccgccttccacaacgtcacggccatggtcggcgccggcgtcctcagcctgccctacgcaatgtccgagctcggctggggtcccggcgtggtcgccatggtcctgtcttgggtgatcaccctgtacacgctgtggcagatggtcgagatgcacgagtgcgtccccgggaagcgtttcgaccgctaccacgagctgggccagcacgcgttcggcgataagctgggcctctggatcgtcgtcccgcagcagctcatcgtcgagatcggcgtctgcatcgtctacatggtcaccggcggcaagtcgttcgagaagtgctacaccgtcgcctgcccggactgcaagccgctccgcaccagctcgtggatcatggtcttcgccgccatccacctgctgctctcgcagctgcccaacttcaactccatcacgctcgtctccctcgccgccgcagtcatgtcgctcacctactcgacgattgcatgggcggcgtcggcgcacaaggggcggcactcggccgtggactacagcatgaaggcgtcgacgacgacggggcagacgttcaacttcctgagcgcgctcggggacgtggcgttcgcgtacgcggggcacaacgtggtgctggagatccaggccaccatcccgtccacgccagacaagccgtccaagaagcccatgtggcagggcgtcgtcctcgcctacctcgtcgtcgccatctgctacctcccggtggcgttcgtcggctactacgtcttcggcaacgccgtcgacgacaacatcctcatcaccctcgagaagccacgctggctcatcgccgccgccaacatcttcgtcgtcgtgcacgtcatcggcagctaccagatctacgccatgcccgtgttcgacatgctcgagacgttcctggtgaagaaactccggttcaagccaggcatgcctctccgtttgatagcgcgctcgctctatgttgtgctgacagctctggttggcatcgccgtgccgttcttcggggggctgctagggttctttggtggcttcgcatttgcgccgacaacctactaccttccgtgcattctgtggttgaagattaagaagccaaagaagttcagcctctcttggttcatcaactggttctgcatcatagtcggcgtgctcctgacggtgcttgcgcccattggtggcctccggtcgatcgtcgtcaacgcctccacctacaagttcttctcgtgatcgggttatcccctcgcgccccatgcattgcggcgcccctagggatattagttagctagctagcaagataaacattagcaggtagctaggtttaaacttttttatgccatatatggtgtgtgtgagtgtgtttggaacttggtttaatttgtgctatcgctaagtcgtcgtcgttcactttc

SEQ ID NO: 288 - protein, 438 aa, Zea mays
  misc_feature: Ceres CLONE ID no.264227
  misc_feature: Score of 271.2 for HMM of FIGURE 5.
  misc_feature (26)..(425): Pfam Name: Aa_trans Pfam Description: Transmembrane amino acid transporter protein
  misc_feature: Functional Homolog Of Ceres SEEDLINE ID no. ME06123 at SEQ ID NO. 94
MATPSSMTSTEKEKAIDDWLPITSSRNAKWWYSAFHNVTAMVGAGVLSLPYAMSELGWGPGVVAMVLSWVITLYTLWQMVEMHECVPGKRFDRYHELGQHAFGDKLGLWIVVPQQLIVEIGVCIVYMVTGGKSFEKCYTVACPDCKPLRTSSWIMVFAAIHLLLSQLPNFNSITLVSLAAAVMSLTYSTIAWAASAHKGRHSAVDYSMKASTTTGQTFNFLSALGDVAFAYAGHNVVLEIQATIPSTPDKPSKKPMWQGVVLAYLVVAICYLPVAFVGYYVFGNAVDDNILITLEKPRWLIAAANIFVVVHVIGSYQIYAMPVFDMLETFLVKKLRFKPGMPLRLIARSLYVVLTALVGIAVPFFGGLLGFFGGFAFAPTTYYLPCILWLKIKKPKKFSLSWFINWFCIIVGVLLTVLAPIGGLRSIVVNASTYKFFS

SEQ ID NO: 289 - protein, 445 aa, Arabidopsis thaliana
  misc_feature: Public GI ID no.30693666
  misc_feature: Score of 250.5 for HMM of FIGURE 5.
  misc_feature (33)..(432): Pfam Name: Aa_trans Pfam Description: Transmembrane amino acid transporter protein
  misc_feature: Functional Homolog Of Ceres SEEDLINE ID no. ME06123 at SEQ ID NO. 94
MVAQAPHDDHDDEKLAAARQKEIEDWLPITSSRNAKWWYSAFHNVTAMVGAGVLGLPYAMSQLGWGPGIAVLVLSWVITLYTLWQMVEMHEMVPGKRFDRYHELGQHAFGEKLGLYIVVPQQLIVEIGVCIVYMVTGGKSLKKFHELVCDDCKPIKLTYFIMIFASVHFVLSHLPNFNSISGVSLAAAVMSLSYSTIAWASSASKGVQEDVQYGYKAKTTAGTVFNFFSGLGDVAFAYAGHNVVLEIQATIPSTPEKPSKGPMWRGVIVAYIVVALCYFPVALVGYYIFGNGVEDNILMSLKKPAWLIATANIFVVIHVIGSYQIYAMPVFDMMETLLVKKLNFRPTTTLRFFVRNFYVAATMFVGMTFPFFGGLLAFFGGFAFAPTTYFLPCVIWLAIYKPKKYSLSWWANWVCIVFGLFLMVLSPIGGLRTIVIQAKGYKFYS

SEQ ID NO: 290 - protein, 446 aa, Arabidopsis thaliana
  misc_feature: Public GI ID no.30693663
  misc_feature: Score of 251.6 for HMM of FIGURE 5.
  misc_feature (34)..(433): Pfam Name: Aa_trans Pfam Description: Transmembrane amino acid transporter protein
  misc_feature: Functional Homolog Of Ceres SEEDLINE ID no. ME06123 at SEQ ID NO. 94
MVAQAPHDDHQDDEKLAAARQKEIEDWLPITSSRNAKWWYSAFHNVTAMVGAGVLGLPYAMSQLGWGPGIAVLVLSWVITLYTLWQMVEMHEMVPGKRFDRYHELGQHAFGEKLGLYIVVPQQLIVEIGVCIVYMVTGGKSLKKFHELVCDDCKPIKLTYFIMIFASVHFVLSHLPNFNSISGVSLAAAVMSLSYSTIAWASSASKGVQEDVQYGYKAKTTAGTVFNFFSGLGDVAFAYAGHNVVLEIQATIPSTPEKPSKGPMWRGVIVAYIVVALCYFPVALVGYYIFGNGVEDNILMSLKKPAWLIATANIFVVIHVIGSYQIYAMPVFDMMETLLVKKLNFRPTTTLRFFVRNFYVAATMFVGMTFPFFGGLLAFFGGFAFAPTTYFLPCVIWLAIYKPKKYSLSWWANWVCIVFGLFLMVLSPIGGLRTIVIQAKGYKFYS

SEQ ID NO: 291 - protein, 418 aa, Arabidopsis thaliana
  misc_feature: Public GI ID no.2443875
  misc_feature: Score of 214.9 for HMM of FIGURE 5.
  misc_feature (24)..(402): Pfam Name: Aa_trans Pfam Description: Transmembrane amino acid transporter protein
  misc_feature (24)..(413): Pfam Name: Aa_trans Pfam Description: Transmembrane amino acid transporter protein
  misc_feature: Functional Homolog Of Ceres SEEDLINE ID no. ME06123 at SEQ ID NO. 94
MKTLRDLQDQSFELEDWLPITASRNANWYYSAFHNVTAIVGAGVLGLPYAMSELGWGPGVVVLILSWVITLYTFWQMIEMHEMFEGKRFDRYHELGQAAFGKKLGLYIVVPLQLLVETSACIVYMVTGGESLKKIHQLSVGDYECRKLKVRHFILIFASSQFVLSLLKNFNSISGVSLVAAVMSMSYSTIAWVASLTKGVANNVEYGYKRRNNTSVPLAFLGALGEMAFAYAGHNVVLEIQATIPSTPENPSKRPMWKGAIVAYIIVAFCYFPVALVGFWTFGNNVEENILKTLRGPKGLIIVANIFVIIHLMGSYQVYAMPVFDMIESVMIKKWHFSPTRVLRFTIRWTFVAATMGIAVALPHFSALLSFFGGFIFAPTTYFIPCIIWLILKKPKRFSLSWCINWASGTPPFGLFVN

SEQ ID NO: 292 - DNA, 1594 bp, Brassica napus
  misc_feature: Ceres CLONE ID no.1257761
  misc_feature: Encodes the peptide sequence at SEQ ID NO 293
atcttaaaatcttcttaatagcctcctctcctcttatctcttctcctctctatatctcaaaaagagtgtcccttatagaacgatatggggaataacgaaacgtcagcgagtgagactgccgcggctaagcagaagaaagtcgacgattggttaccgatcacatcctcaagaaacgccaagtggtggtactctgcgtttcacaatgttactgccatggttggtgctggtgttctcagcttgccctacgccatgtccaatctcggatggggacctggcgtgacgttgatgataatgtcatgggtgataactttgtacacactgtggcaaatggtggagatgcacgagattgtacctgggaagaggtttgatagatatcacgagctaggtcaagaagcttttggtgaaaagcttggcctttggatcattgtgcctcagcaactcatcgtggaggtcggtgtagacattgtttatatggtcactggagggaaatctctacagaaagtccatgaactcctctgctctgattgcaaagacatcaaaactacatattggatcatgatctttgcgtctatccacttcgttatctctcacctaccaaactttaactccatgtccgtcatctcactcgccgctgccgttatgtccttaacttactcaactatcgcgtggactgcatcagtgcacaaaggggttcgtccagatgtagactactcgtctagagcctcgacaagtgctggaaatgtattcaacttcttgaacgcgttgggagatgtggcttttgcctacgcaggtcacaacgtcgttttggagattcaagccaccatcccttcgactccggaggtgccatccaaggttccaatgtttagaggagtcgttgtagcctacatcatagtagccatttgctactttcctgtagcgttcctagggtactggatctttgggaacagcgttgatgacaacattctaatgactttggagaagcctgtatggcttatcgcaatggctaacttatttgtggtcatccacgttattggaagctatcagatttttgcaatgccggtttttgacatgcttgaaaccgttttggtcaagaagatgaatttcgatccatccttcaaactccgcttcatcactcgcagtctttatgttgctttcactatgtccattgcgatatgtatcccgttttttggtggactactcggcttctttggaggatttgcctttgcaccaacaacttactaccttccatgcattatttggctcattctcaagaaaccaaagaagtttagtctatcatggataatcaactggttttgcattatattaggagttattttgacggtcatggctcccattggtggcctcagaactattattgtcaacgcaagcacctacaagttcttttcttagatttcttcttgtaccacacaaaaaaaaaaagtagatctaaggaaataagccacggccagtctcgttttctatgactgtccgttttgttacttttaaggttttagtatagttcaagattcgtaatttatgtaatctgctgctttatattaaaacttcatattccggttcaaaaaaaaaaaaaaaa

SEQ ID NO: 293 - protein, 441 aa, Brassica napus
  misc_feature: Ceres CLONE ID no.1257761
  misc_feature: Score of 245.5 for HMM of FIGURE 5.
  misc_feature (29)..(428): Pfam Name: Aa_trans Pfam Description: Transmembrane amino acid transporter protein
  misc_feature: Functional Homolog Of Ceres SEEDLINE ID no. ME06123 at SEQ ID NO. 94
MGNNETSASETAAAKQKKVDDWLPITSSRNAKWWYSAFHNVTAMVGAGVLSLPYAMSNLGWGPGVTLMIMSWVITLYTLWQMVEMHEIVPGKRFDRYHELGQEAFGEKLGLWIIVPQQLIVEVGVDIVYMVTGGKSLQKVHELLCSDCKDIKTTYWIMIFASIHFVISHLPNFNSMSVISLAAAVMSLTYSTIAWTASVHKGVRPDVDYSSRASTSAGNVFNFLNALGDVAFAYAGHNVVLEIQATIPSTPEVPSKVPMFRGVVVAYIIVAICYFPVAFLGYWIFGNSVDDNILMTLEKPVWLIAMANLFVVIHVIGSYQIFAMPVFDMLETVLVKKMNFDPSFKLRFITRSLYVAFTMSIAICIPFFGGLLGFFGGFAFAPTTYYLPCIIWLILKKPKKFSLSWIINWFCIILGVILTVMAPIGGLRTIIVNASTYKFFS

SEQ ID NO: 294 - DNA, 1479 bp, Brassica napus
  misc_feature: Ceres CLONE ID no.1109755
  misc_feature: Encodes the peptide sequence at SEQ ID NO 295
aacttgtcaagacttcttctctcctctttatatctttctccctcattttctctcggtgtaatcatggtaaatcaagctcctcaagatgattatgatgatgagaaatcggcaagacaaaaggaaatcgaagattggttaccaattacttcatcaagaaatgctaagtggtggtactcagcttttcacaatgtcaccgccatggtcggtgcaggagttctcggcctcccttacgccatgtctcagcttggctggggaccaggagttgcagtattggttctctcatgggtaataacactatacacattatggcaaatggttgaaatgcacgaaatggttccgggaaagcgttttgatcgttaccatgaactcggacaacacgcgtttggagaaaagcttggtctttatatagtcgtaccgcaacagctgatcgtggaaataggcgtttgtatcgtttatatggtcactggaggcaaatctctaaagaagtttcatgagcttgtttgtgaggattgcaaacccatcaagcttacttacttcatcatgatctatgcttctgttcacttcgtcctctctcatctccccaatttcaattccatctctggcgtttctctcgccgcggcggttatgtctctaagctactcaacaatcgcatggacagcttcgacgagtaaaggcgttcgagaagatgttgaatatggttacaaagcaaaatcaacagccggtacggttttcaacttcttcagcggtttaggtgatgtggcattcgcttacgcaggccacaatgtggtccttgagatccaagcaacgatcccttcgactcctgagaaaccatcaaaaggcccaatgtggaaaggagtcatcgttgcttacatcgttgtcgcactttgttattttccggtggctctcgtcggatactacattttcgggaacagtgttgaagataatatcctcatatcacttaaaaagccagtttggttaatcgcgacggctaatatctttgttgtgatccatgttatcggtagttaccagatatatgcaatgccggtttttgacatgatggaaactttattggttaagaagcttaattttagaccaaccacgattctccggttctgtgttcgtaatttctatgttgctgcaaccatgtttcttggtatgacgttcccgttctttggtggccttttggcgttctttggtggattcgcgtttgcccctacgacatacttcctaccttgcataatttggctagccatctacaaacctaggaagtacggcttgtcttggtgggccaactgggtatgtatcgtgtttggtattttcttaatggtcttgtcgcctattggagggctaaggacgatcgttattcaagcaaaggaataccagttttactcgtaaatgctgtttaatatgactaatgtttagagacatatttatatattaatgtgtgaagattttaaaagatcaaaaaaaaaaaaaaaa

SEQ ID NO: 295 - protein, 443 aa, Brassica napus
  misc_feature: Ceres CLONE ID no.1109755
  misc_feature: Score of 247.1 for HMM of FIGURE 5.
  misc_feature (31)..(430): Pfam Name: Aa_trans Pfam Description: Transmembrane amino acid transporter protein
  misc_feature: Functional Homolog Of Ceres SEEDLINE ID no. ME06123 at SEQ ID NO. 94
MVNQAPQDDYDDEKSARQKEIEDWLPITSSRNAKWWYSAFHNVTAMVGAGVLGLPYAMSQLGWGPGVAVLVLSWVITLYTLWQMVEMHEMVPGKRFDRYHELGQHAFGEKLGLYIVVPQQLIVEIGVCIVYMVTGGKSLKKFHELVCEDCKPIKLTYFIMIYASVHFVLSHLPNFNSISGVSLAAAVMSLSYSTIAWTASTSKGVREDVEYGYKAKSTAGTVFNFFSGLGDVAFAYAGHNVVLEIQATIPSTPEKPSKGPMWKGVIVAYIVVALCYFPVALVGYYIFGNSVEDNILISLKKPVWLIATANIFVVIHVIGSYQIYAMPVFDMMETLLVKKLNFRPTTILRFCVRNFYVAATMFLGMTFPFFGGLLAFFGGFAFAPTTYFLPCIIWLAIYKPRKYGLSWWANWVCIVFGIFLMVLSPIGGLRTIVIQAKEYQFYS

SEQ ID NO: 296 - protein, 479 aa, Arabidopsis thaliana
  misc_feature: Public GI ID no.15232176
  misc_feature: Score of 206.1 for HMM of FIGURE 5.
  misc_feature (56)..(458): Pfam Name: Aa_trans Pfam Description: Transmembrane amino acid transporter protein
  misc_feature: Functional Homolog Of Ceres SEEDLINE ID no. ME06123 at SEQ ID NO. 94
MAGIPDHIQDQHLVEEVYAFYDFVTLKNFILKEFLLLYLQDQPFDLEDWLPITASRNANWYYSAFHNVTAIVGAGVLGLPYAMSELGWGPGVVVLILSWVITLYTLWQMIEMHEMFEGQRFDRYHELGQAAFGKKLGLYIIVPLQLLVEISVCIVYMVTGGKSLKNVHDLALGDGDKCTKLRIQHFILIFASSQFVLSLLKNFNSISGVSLVAAVMSVSYSTIAWVASLRKGATTGSVEYGYRKRTTSVPLAFLSALGEMAFAYAGHNVVLEIQATIPSTPENPSKRPMWKGAVVAYIIVAFCYFPVALVGFKTFGNSVEESILESLTKPTALVIVANMFVVIHLLGSYQVYAMPVFDMIESVMIRIWHFSPTRVLRFTIRWTFVAATMGIAVGLPYYSALLSFFGGFVFAPTTYFIPCIMWLILKKPKRFSLSWCMNWFCIIFGLVLMIIAPIGGLAKLIYNIQKGTLPNSRCNLPKH

SEQ ID NO: 297 - protein, 455 aa, Arabidopsis thaliana
  misc_feature: Public GI ID no.6091720
  misc_feature: Score of 210.6 for HMM of FIGURE 5.
  misc_feature (32)..(434): Pfam Name: Aa_trans Pfam Description: Transmembrane amino acid transporter protein
  misc_feature: Functional Homolog Of Ceres SEEDLINE ID no. ME06123 at SEQ ID NO. 94
MAGIPDHIQDQHLVEEDQPFDLEDWLPITASRNANWYYSAFHNVTAIVGAGVLGLPYAMSELGWGPGVVVLILSWVITLYTLWQMIEMHEMFEGQRFDRYHELGQAAFGKKLGLYIIVPLQLLVEISVCIVYMVTGGKSLKNVHDLALGDGDKCTKLRIQHFILIFASSQFVLSLLKNFNSISGVSLVAAVMSVSYSTIAWVASLRKGATTGSVEYGYRKRTTSVPLAFLSALGEMAFAYAGHNVVLEIQATIPSTPENPSKRPMWKGAVVAYIIVAFCYFPVALVGFKTFGNSVEESILESLTKPTALVIVANMFVVIHLLGSYQVYAMPVFDMIESVMIRIWHFSPTRVLRFTIRWTFVAATMGIAVGLPYYSALLSFFGGFVFAPTTYFIPCIMWLILKKPKRFSLSWCMNWFCIIFGLVLMIIAPIGGLAKLIYNIQKGTLPNSRCNLPKH

SEQ ID NO: 298 - DNA, 1182 bp, Populus balsamifera subsp. trichocarpa
  misc_feature: Ceres ANNOT ID no.1512922
  misc_feature: Encodes the peptide sequence at SEQ ID NO 299
atggcttacaacgagtcacggaatgatgcagcagcaaaagagaaggccatagatgattggcttccaatcacttcctctaggaaagccaaatggtggtactcaaccttccacaatgttactgccatggttggtgctggtgtccttagcctcccctatgccatggctcaacttggatggggaccaggaatcgccatacttgttttgtcatgggtgatcacgttgtacactctgtggcaaatggtcgaaatgcatgagatggtgcctggcaagcgatttgacaggtaccatgagctagggcaacatgtgtttggagacaagctgggtctctggattgttgtgccacagcaactaattgttcaagttggagtaaatattgtctacatggttactggaggaaaatcattgaagaagttccatgatgtggtttgccccaactgcaaagacatcaggctaacatacttcatcatgattttcgcctcagttcagatggtactggctcatcttcccaatctcaactccattagtgtaatctcgctggctgcagcagtcatgtccttaagttactctacaattgcttgggctgtcacgcttaacaagggggttcagcctgatgtcgactacagctacaaagcaagaactagaacaggagctttctttgactttatcactgccttgggtgatgtagcttttgcatatgctggtcacaatgtggtcttggagattcaagcaacaatcccttcttctccagagaagccttccaagaaacccatgtggagaggagctttccttgcatatctcgtcgtcgccttctgctacttcccagttgccttgattggatactggtgttatggcaacagcgtggacgacaacattctaatctcactgcagaaaccatcttggcttattgcagctgctaacatgtttgttgtcattcatgttattggaagctaccagatatatgcaattgcagtgttcgacttgctggaaactgcattgggctcacaatgtttgttgctcccctgcgtcatgtggctttccatctacaaaccgaagaggttcggcttctcttggacagcaaattgggtctgcgttatacttggcgttctcttgatgatactgtcacccattggtgccctaaggcatatcatccttacagccaaggactacgaattcttctcatga

SEQ ID NO: 299 - protein, 393 aa, Populus balsamifera subsp. trichocarpa
  misc_feature: Ceres ANNOT ID no.1512922
  misc_feature: Score of 165.9 for HMM of FIGURE 5.
  misc_feature (27)..(330): Pfam Name: Aa_trans Pfam Description: Transmembrane amino acid transporter protein
  misc_feature: Functional Homolog Of Ceres SEEDLINE ID no. ME06123 at SEQ ID NO. 94
MAYNESRNDAAAKEKAIDDWLPITSSRKAKWWYSTFHNVTAMVGAGVLSLPYAMAQLGWGPGIAILVLSWVITLYTLWQMVEMHEMVPGKRFDRYHELGQHVFGDKLGLWIVVPQQLIVQVGVNIVYMVTGGKSLKKFHDVVCPNCKDIRLTYFIMIFASVQMVLAHLPNLNSISVISLAAAVMSLSYSTIAWAVTLNKGVQPDVDYSYKARTRTGAFFDFITALGDVAFAYAGHNVVLEIQATIPSSPEKPSKKPMWRGAFLAYLVVAFCYFPVALIGYWCYGNSVDDNILISLQKPSWLIAAANMFVVIHVIGSYQIYAIAVFDLLETALGSQCLLLPCVMWLSIYKPKRFGFSWTANWVCVILGVLLMILSPIGALRHIILTAKDYEFFS

SEQ ID NO: 300 - protein, 441 aa, Arabidopsis thaliana
  misc_feature: Public GI ID no.15220504
  misc_feature: Score of 246.0 for HMM of FIGURE 5.
  misc_feature (29)..(428): Pfam Name: Aa_trans Pfam Description: Transmembrane amino acid transporter protein
  misc_feature: Functional Homolog Of Ceres SEEDLINE ID no. ME06123 at SEQ ID NO. 94
MEKSQSSPTKDASTKQKNVDDWLPITSSRNAKWWYSAFHNVTAMVGAGVLSLPYAMSNLGWGPGVTIMIMSWLITFYTLWQMVQMHEMVPGKRFDRYHELGQHAFGEKLGLWIVVPQQLIVEVGVDIVYMVTGGKSLKKIHDLLCTDCKNIRTTYWIMIFASIHFVLAHLPNFNSISIVSLAAAVMSLSYSTIAWATSVKKGVHPNVDYSSRASTTSGNVFNFLNALGDVAFAYAGHNVVLEIQATIPSTPEKPSKIAMWKGVVVAYIVVAICYFPVAFVCYYIFGNSVDDNILMTLEKPIWLIAIANAFVVVHVIGSYQIYAMPVFDMLETFLVKKMMFAPSFKLRFITRTLYVAFTMFVAICIPFFGGLLGFFGGFAFAPTTYYLPCIMWLCIKKPKKYGLSWCINWFCIVVGVILTILAPIGGLRTIIISAKNYEFFS

SEQ ID NO: 301 - protein, 442 aa, Arabidopsis thaliana
  misc_feature: Public GI ID no.116830999
  misc_feature: Score of 246.5 for HMM of FIGURE 5.
  misc_feature (29)..(428): Pfam Name: Aa_trans Pfam Description: Transmembrane amino acid transporter protein
  misc_feature: Functional Homolog Of Ceres SEEDLINE ID no. ME06123 at SEQ ID NO. 94
MEKSQSSPTKDASTKQKNVDDWLPITSSRNAKWWYSAFHNVTAMVGAGVLSLPYAMSNLGWGPGVTIMIMSWLITFYTLWQMVQMHEMVPGKRFDRYHELGQHAFGEKLGLWIVVPQQLIVEVGVDIVYMVTGGKSLKKIHDLLCTDCKNIRTTYWIMIFASIHFVLAHLPNFNSISIVSLAAAVMSLSYSTIAWATSVKKGVHPNVDYSSRASTTSGNVFNFLNALGDVAFAYAGHNVVLEIQATIPSTPEKPSKIAMWKGVVVAYIVVAICYFPVAFVCYYIFGNSVDDNILMTLEKPIWLIAIANAFVVVHVIGSYQIYAMPVFDMLETFLVKKMMFAPSFKLRFITRTLYVAFTMFVAICIPFFGGLLGFFGGFAFAPTTYYLPCIMWLCIKKPKKYGLSWCINWFCIVVGVILTILAPIGGLRTIIISAKNYEFFSG

SEQ ID NO: 302 - protein, 441 aa, Arabidopsis thaliana
  misc_feature: Public GI ID no.18395471
  misc_feature: Score of 250.9 for HMM of FIGURE 5.
  misc_feature (29)..(428): Pfam Name: Aa_trans Pfam Description: Transmembrane amino acid transporter protein
  misc_feature: Functional Homolog Of Ceres SEEDLINE ID no. ME06123 at SEQ ID NO. 94
MGNSEMSASEVAAAKQKNVDDWLPITSSRNAKWWYSAFHNVTAMVGAGVLSLPYAMSNLGWGPGVTIMVMSWIITLYTLWQMVEMHEIVPGKRLDRYHELGQHAFGEKLGLWIVVPQQLIVEVGVDIVYMVTGGASLKKVHQLVCPDCKEIRTTFWIMIFASVHFVISHLPNFNSISIISLAAAVMSLTYSTIAWAASVHKGVHPDVDYSPRASTDVGKVFNFLNALGDVAFAYAGHNVVLEIQATIPSTPEMPSKVPMWRGVIVAYIVVAICYFPVAFLGYYIFGNSVDDNILITLEKPIWLIAMANMFVVIHVIGSYQIFAMPVFDMLETVLVKKMNFNPSFKLRFITRSLYVAFTMIVAICVPFFGGLLGFFGGFAFAPTTYYLPCIMWLVLKKPKRFGLSWTANWFCIIVGVLLTILAPIGGLRTIIINAKTYKFFS

SEQ ID NO: 303 - DNA, 1434 bp, Populus balsamifera subsp. trichocarpa
  misc_feature: Ceres ANNOT ID no.1463076
  misc_feature: Encodes the peptide sequence at SEQ ID NO 304
atgccatccaatgagtcacagaacgatgaagcagcaagagaaaaggccataaatgattggcttccagtcacttcctcgaggaatgccaaatggtggtactcaaccttccacaatgtcactgccatggttggtgctggtgttcttagtctcccctatgccatggctcaacttggatggggaccaggtgttgccatactttttttatcatgggtgatcacgttatacactctatggcaaatggttgaaatgcatgagatggttcctggtaagcgatttgatagataccatgagctagggcaacatgcgtttggagagaagctgggtctctggattgttgtgccacagcaactagttgtacaagttggagtaaacatagtctatatggttaccggaggaaaatcattgaagaagttccatgatttggtttgctccgactgcaaagacatcaggctaacgtacttcatcatgattttcgcttcgcttcagtttgttctggctcatcttcccaatctcaactccattagtgttatctctctggctgcagcagtcatgtccttgagttactccacaattgcctggggagccacccttaataagggtgttcagcctgatgtcgactacagctataaagcgagcactaaaaccggagctgtctttgactttttctctgccttgggtgatatagcttttgcatatgccggtcacaatgtgatcttggagatccaagcaacaattccctctactccagagaagccttccaagaaacccatgtggagaggagccttccttgcatatgttgtcgtcgccatctgctacttcccagttgccttgattggatactggttttttggaaacagcgtggaagacaacattcttatctcactcgagaaaccagcttggcttattgcaactgctaacatgtttgttgtcattcatgttattggaagttatcagatatatgctatggcagtgttcgacatgttggaaactgcattggtgaagaaactccatttttctccttctttcatgcttcgctttgttactcgcacggtatatgttgggttcacaatgattgttggtatatgtattccattcttcggtggcctgctttcgttcttcggaggatttgcttttgccccaacaacatactttctcccttgcatcatgtggcttgccatctataaacccaagaagttcagcttctcttggatagcaaattgggtgcgtctgcattgtgcttggaattttgctgatgatattgtcacccattggtgccctaagacatatcatccttacagccaaagactacgagttcttctcatgagcatcacaccaaatgcgagacaagggcagaccaagtactgtaaagaaagggtgttgattgagttgctggttatggcctttgcacttagcaggaaactcaaatttaattaa

SEQ ID NO: 304 - protein, 477 aa, Populus balsamifera subsp. trichocarpa
  misc_feature: Ceres ANNOT ID no.1463076
  misc_feature: Score of 199.0 for HMM of FIGURE 5.
  misc_feature (27)..(405): Pfam Name: Aa_trans Pfam Description: Transmembrane amino acid transporter protein
  misc_feature (27)..(421): Pfam Name: Aa_trans Pfam Description: Transmembrane amino acid transporter protein
  misc_feature: Functional Homolog Of Ceres SEEDLINE ID no. ME06123 at SEQ ID NO. 94
MPSNESQNDEAAREKAINDWLPVTSSRNAKWWYSTFHNVTAMVGAGVLSLPYAMAQLGWGPGVAILFLSWVITLYTLWQMVEMHEMVPGKRFDRYHELGQHAFGEKLGLWIVVPQQLVVQVGVNIVYMVTGGKSLKKFHDLVCSDCKDIRLTYFIMIFASLQFVLAHLPNLNSISVISLAAAVMSLSYSTIAWGATLNKGVQPDVDYSYKASTKTGAVFDFFSALGDIAFAYAGHNVILEIQATIPSTPEKPSKKPMWRGAFLAYVVVAICYFPVALIGYWFFGNSVEDNILISLEKPAWLIATANMFVVIHVIGSYQIYAMAVFDMLETALVKKLHFSPSFMLRFVTRTVYVGFTMIVGICIPFFGGLLSFFGGFAFAPTTYFLPCIMWLAIYKPKKFSFSWIANWVRLHCAWNFADDIVTHWCPKTYHPYSQRLRVLLMSITPNARQGQTKYCKERVLIELLVMAFALSRKLKFN

SEQ ID NO: 305 - DNA, 1704 bp, Panicum virgatum
  misc_feature: Ceres CLONE ID no.1904659
  misc_feature: Encodes the peptide sequence at SEQ ID NO 306
ttttccattagctctataaattaaagaagaagagcgcttgcgctgtctgccgcctccgctccttccccattgctgaaggctcagtggcatccatcgtcgacgtcgaggcgctcctgccggcggccatggagatacagcagctcgacgactactctccggccaagcttgccagccttgctcttgcgcccagcaaagggcgtacggactccaaggagggcagctggagcgcgccggagaagccggtcgaggactggcgtgccatcaactcgaggaggaacgccaagtggtggtacgccgccttccacaatgtcaccgccatggtcggcgccggcgtgcttagccttcccttcgccatgtccgagctcggctggggggttggcatcacggtgctggtcctgtcatggatcctcacggtgtacaccctgtggcagatggtggagatgcacgagatcgtgccggggaagcggttcgaccggtaccacgagctggggcagcacgcgttcggcgagaagctgggcctctggatcgtcgtgccgcagcagctggtggtggaggtcggcctgaacattgtctacatggtcaccggcggccagtccctgcagaagttccacgacttggtctgccacggcaggtgcaataacatcaagctcccctatttcatcatgatcttcgcctccgtccagttcgtgctctcccagctccccaacttccactccatctccagcatctccctcatcgcagccgtcatgtcagtcagttactcgacgattgcatgggctgcatcaacacatcatcacaagacaaattcggcagaggtggactacagccttcgtgcaacgacgacgcccggcaaggtgttcgacttcttggggggactgggcgacgtggcgttcacatacgccgggcacaacgtggtgctggagatccaggccaccatcccgtcgacgccggagaagccgtccaagaagcccatgtggaagggcgtcgtcgtcgcctacatcatcatcgccgcgtgctacttccctgttgcgcacgccggctactgggccttcggcaaccaagtggatgagaacatcctcatcgccctaaacaaacccaagtggctcatcgccgtcgccaacatgatggtcgtcgtccatgtcgttggcagctaccaggtctatgcgatgccggtattcgacatgatagagacgatgctagtgaggaagttttggttcactccagacctgaggctccgtctgatttcccggactgtctatgttgcgttcacaatgttcatagccatgaccttccccttcttcagtgaattgctcagtttcttcggtggatttgcctacgcgccaacaacttatttccttccctgcatcatgtggctcataatctgcaagccgaaaagattcagcctctcatggttcgccaactggacgtgcatttttattggagtgccactgatgatattggcaccgattggaggtctccggcagatcattttgagggtcaagacatacaaattctaccaagactaccatggtttaagccattagccatagttaacagagctcaccatgtctcaggccatcattagcattttaaaaaaaaatcgtaccgtaaaattcctcttttttttgtttctggcatgataagggaaattgacatcatcatgtactgtaatttgcccgtggaaatgcgagttttatgccatgc

SEQ ID NO: 306 - protein, 472 aa, Panicum virgatum
  misc_feature: Ceres CLONE ID no.1904659
  misc_feature: Score of 238.3 for HMM of FIGURE 5.
  misc_feature (50)..(452): Pfam Name: Aa_trans Pfam Description: Transmembrane amino acid transporter protein
  misc_feature: Functional Homolog Of Ceres SEEDLINE ID no. ME06123 at SEQ ID NO. 94
MEIQQLDDYSPAKLASLALAPSKGRTDSKEGSWSAPEKPVEDWRAINSRRNAKWWYAAFHNVTAMVGAGVLSLPFAMSELGWGVGITVLVLSWILTVYTLWQMVEMHEIVPGKRFDRYHELGQHAFGEKLGLWIVVPQQLVVEVGLNIVYMVTGGQSLQKFHDLVCHGRCNNIKLPYFIMIFASVQFVLSQLPNFHSISSISLIAAVMSVSYSTIAWAASTHHHKTNSAEVDYSLRATTTPGKVFDFLGGLGDVAFTYAGHNVVLEIQATIPSTPEKPSKKPMWKGVVVAYIIIAACYFPVAHAGYWAFGNQVDENILIALNKPKWLIAVANMMVVVHVVGSYQVYAMPVFDMIETMLVRKFWFTPDLRLRLISRTVYVAFTMFIAMTFPFFSELLSFFGGFAYAPTTYFLPCIMWLIICKPKRFSLSWFANWTCIFIGVPLMILAPIGGLRQIILRVKTYKFYQDYHGLSH

SEQ ID NO: 307 - DNA, 1308 bp, Populus balsamifera subsp. trichocarpa
  misc_feature: Ceres ANNOT ID no.1458889
  misc_feature: Encodes the peptide sequence at SEQ ID NO 308
atggtttcagcttctccttctaaggaagaccagtccattggcaaatggaccgaaggcgatcccgctcgccgagccaaatggtggtactcaactttccacacagtcacagccatgatcggtgcaggtgttctaagtctgccctatgccatggcttacttaggctggggtccagggataacggttctggtgttatcttggtgcatgaccctgaacacaatgtggcaaatgatcgaactccatgaatgtgttcctgggactcgctttgatcgctacatcgacctaggtcgacatgctttcggcccgaaattgggaccatggattgtcctacctcagcagctgattgttcaagttggttgtgatatcgtgtacatggttacgggtggaaagagtttaaagaagttcatggagatgacttgcgcctcttgcaccccaataaggcagtcttactggattttgatcttcggtggcatccatttcttcttgtctcagcttccgaatttcaattctgttgctggcgtttcactagctgcagcagtcatgtcactcggttattcaaccatagcctgggcaggttccttggctcatggccagattgataacgtgagctatgcttacaaaaacaccagcgcagctgactacatgtttcgtgtcttcaatgcactgggagaaatttctttcgcgttcgctggccatgcagttgtccttgagattcaggctacaattccatcaactactgagaagccttccaaaatcccaatgtggaaaggtgcactgggtgcttactttatcaatgcaatttgctatttccccgttgcccttatagggtattgggcatttggacaagatgttgatgataatgtccttatggagctgaaaagacccgcatggctcattgcctctgctaatttaatggtggtagttcatgtcattggtagctaccaggtctatgccatgcctgtttttgacatgctagagaggatgatgatgaaaagattcagttttccaccaggacttgcacttaggctcgtaactcgctctacttatgttgcatttacccttttcgttggagtcaccttcccattcttcggagatcttcttggtttctttggcgggtttggttttgcccccacttcatacttcctcccttgcgtaatgtggctaataatcaagaagcctaaaagattcagcaccaaatggtttataaactgggcatgcatattcgttggagtgttcatcatgatggcatccaccattggtgggttccggaatatcgttaccgatgcctcctcgtataggttctacacataa

SEQ ID NO: 308 - protein, 435 aa, Populus balsamifera subsp. trichocarpa
  misc_feature: Ceres ANNOT ID no.1458889
  misc_feature: Score of 223.7 for HMM of FIGURE 5.
  misc_feature (23)..(422): Pfam Name: Aa_trans Pfam Description: Transmembrane amino acid transporter protein
  misc_feature: Functional Homolog Of Ceres SEEDLINE ID no. ME06123 at SEQ ID NO. 94
MVSASPSKEDQSIGKWTEGDPARRAKWWYSTFHTVTAMIGAGVLSLPYAMAYLGWGPGITVLVLSWCMTLNTMWQMIELHECVPGTRFDRYIDLGRHAFGPKLGPWIVLPQQLIVQVGCDIVYMVTGGKSLKKFMEMTCASCTPIRQSYWILIFGGIHFFLSQLPNFNSVAGVSLAAAVMSLGYSTIAWAGSLAHGQIDNVSYAYKNTSAADYMFRVFNALGEISFAFAGHAVVLEIQATIPSTTEKPSKIPMWKGALGAYFINAICYFPVALIGYWAFGQDVDDNVLMELKRPAWLIASANLMVVVHVIGSYQVYAMPVFDMLERMMMKRFSFPPGLALRLVTRSTYVAFTLFVGVTFPFFGDLLGFFGGFGFAPTSYFLPCVMWLIIKKPKRFSTKWFINWACIFVGVFIMMASTIGGFRNIVTDASSYRFYT

SEQ ID NO: 309 - protein, 440 aa, Arabidopsis thaliana
  misc_feature: Public GI ID no.15222615
  misc_feature: Score of 222.3 for HMM of FIGURE 5.
  misc_feature (28)..(427): Pfam Name: Aa_trans Pfam Description: Transmembrane amino acid transporter protein
  misc_feature: Functional Homolog Of Ceres SEEDLINE ID no. ME06123 at SEQ ID NO. 94
MVSSSPVSPSKETDRKSGEKWTAEDPSRPAKWWYSTFHTVTAMIGAGVLSLPYAMAYLGWGPGTFVLAMTWGLTLNTMWQMVQLHECVPGTRFDRYIDLGRYAFGPKLGPWIVLPQQLIVQVGCNIVYMVTGGKCLKQFVEITCSTCTPVRQSYWILGFGGVHFILSQLPNFNSVAGVSLAAAVMSLCYSTIAWGGSIAHGRVPDVSYDYKATNPGDFTFRVFNALGQISFAFAGHAVALEIQATMPSTPERPSKVPMWQGVIGAYVVNAVCYFPVALICYWAFGQDVDDNVLMNLQRPAWLIAAANLMVVVHVIGSYQVFAMPVFDLLERMMVNKFGFKHGVVLRFFTRTIYVAFTLFIGVSFPFFGDLLGFFGGFGFAPTSFFLPSIMWLIIKKPRRFSVTWFVNWISIIVGVFIMLASTIGGLRNIIADSSTYSFYA

SEQ ID NO: 310 - DNA, 1305 bp, Populus balsamifera subsp. trichocarpa
  misc_feature: Ceres ANNOT ID no.1527205
  misc_feature: Encodes the peptide sequence at SEQ ID NO 311
atgaatcaaatgcagccagtaaaggatatctcaagcattgagaatgcaaagaatgacaatgcgaagaaagacatgaatgactggcttcccatcaccaagtctaggaatgcaaagtggtggtattctgcctttcacaatgttacagccatggttggtgctggggtcctgggcctcccatatgccatgtctcaacttggatggggtcccggtgctgctgtattgatcctgtcatgggttatcactctatatacactatggcagatggtggagatgcatgaaatggtgcctggaaagagatttgataggtatcatgagttagggcagcatgcatttggtgaaaaacttgggctttgggtggtggttccccagcaactaatggtggaagtgggttcgagtatagtgtatatgatcactggagggaaatctctgaagaaggctcatgatactatctggcctaactacaaagaaatcaaacttacctatttcatcatgatcttttcctcggttcactttgtcatctctcatctccccagtttcaactccatcaccgttgtctctcttgccgctgccgtcatgtccttgagttactcgactattgcgtgggtggtttcatggcacaaaggggttcaaccagatgtgcagtatacctcaagggcttcaacaaataccgggcagatgttcgacagcttcagtgctctaggagatatagcttttgccttcgcagggcacagtgtggcgttggagatccaggcaacaatcccttccacaccagggaagccttccaagaaaccaatgtggaaaggagtggttgttgcttatcttgttgtcgctttgtgttacttacctgttagtttcgtaggttactgggtgtttggaaacaaagttgaggacaacatactcttatcactagagaagcctcgttggcttgttgccgtcgctaatttgtttgttgtcattcatgtcattggaagctatcaggtttttgcaatgccggtgtttgatatgatggaagcattcctagtcttgaaaatgaatttccaaccgggattgaccatgttcatcgcaatgacattcccattttttggtgggcttctaagtttctttggaggatttgcctttgctcccacctcatactatctcccctgcgtcatttggcttgctatatataaaccaaagaaattcagcttgtcatggctcgcaaattggatatgcattatccttggcgttgtattgatggtattagcccccattggagcattaaggcagataatactacaagccagggacttccagttttactcttga

SEQ ID NO: 311 - protein, 431 aa, Populus balsamifera subsp. trichocarpa
  misc_feature: Ceres ANNOT ID no.1527205
  misc_feature: Score of 214.5 for HMM of FIGURE 5.
  misc_feature (32)..(418): Pfam Name: Aa_trans Pfam Description: Transmembrane amino acid transporter protein
  misc_feature: Functional Homolog Of Ceres SEEDLINE ID no. ME06123 at SEQ ID NO. 94
MQPVKDISSIENAKNDNAKKDMNDWLPITKSRNAKWWYSAFHNVTAMVGAGVLGLPYAMSQLGWGPGAAVLILSWVITLYTLWQMVEMHEMVPGKRFDRYHELGQHAFGEKLGLWVVVPQQLMVEVGSSIVYMITGGKSLKKAHDTIWPNYKEIKLTYFIMIFSSVHFVISHLPSFNSITVVSLAAAVMSLSYSTIAWVVSWHKGVQPDVQYTSRASTNTGQMFDSFSALGDIAFAFAGHSVALEIQATIPSTPGKPSKKPMWKGVVVAYLVVALCYLPVSFVGYWVFGNKVEDNILLSLEKPRWLVAVANLFVVIHVIGSYQVFAMPVFDMMEAFLVLKMNFQPGLTMFIAMTFPFFGGLLSFFGGFAFAPTSYYLPCVIWLAIYKPKKFSLSWLANWICIILGVVLMVLAPIGALRQIILQARDFQFYS

SEQ ID NO: 312 - protein, 456 aa, Oryza sativa subsp. japonica
  misc_feature: Public GI ID no.53749301
  misc_feature: Score of 228.3 for HMM of FIGURE 5.
  misc_feature (38)..(443): Pfam Name: Aa_trans Pfam Description: Transmembrane amino acid transporter protein
  misc_feature: Functional Homolog Of Ceres SEEDLINE ID no. ME06123 at SEQ ID NO. 94
MSATEVMEECTETARERREEERLRNVNLDDWLPITSSRTAKWYYSAFHNVTAMVGAGVLGLPFAMSQLGWPTGVAAIASSFAITLYTLWQLVELHEPAPGGGKRFDRYHELGQAAFGRRLGVCLIVPLQLIVQVGTDIVYMVTGGQTLKKFVELACDGRCADIRLTFYIMMFASAQFVLSQCPNFNSISAVSAAAAAMSLCYSMIAFFASVLKAHPAAAAAVDYGFKATTAAGRVFGAFNALGAVSFAFAGHNVVLEIQATIPSTPERPSKRPMWRGVVVAYAVVALCYFTVAFGGYHAFGNAVAPNVLISLEKPRWLVAAANLMVVVHVIGAYQVYAMPVFDMIETVLAKKLHLRPGLPLRVTARSAYVALTMFIGITFPFFDGLLGFFGGFGFAPTTYFIPCIIWLIMRKPAKYSLSWLMNWCFIIIGMLLMLVSPIGGLRQIILDASKYKFYS

SEQ ID NO: 313 - protein, 478 aa, Oryza sativa subsp. japonica
  misc_feature: Public GI ID no.115458804
  misc_feature: Score of 177.2 for HMM of FIGURE 5.
  misc_feature (56)..(465): Pfam Name: Aa_trans Pfam Description: Transmembrane amino acid transporter protein
  misc_feature: Functional Homolog Of Ceres SEEDLINE ID no. ME06123 at SEQ ID NO. 94
MGEGRSGVGQAETSASSGDTSMAQGPVERQRRGSGAALGMTTAVVDDAGEGEANPRRAKWWYATFHSVTAMVGAGVLSLPYAMAHLGWGPGTAALVVSWGMTLYTLRLLIELHECVPGVRFDRYRDLGAHALGPRLGPWLVVPQQLIVQLGCDVVYMVIGGKCLMKFAESVSSWSRAPQLHHQSYWICIFGASQFLLSQLPSLDSITAVSLAAAAMSVGYSTISWAACLARGTPAAAEGGGGGVSYAYKDGTAADSVFRVCSALGQVAFAYAGHGVVLEIQATIPSTPTKPSRGAMWKGAVAAYLVTALCYFPVAIAGYWAFGRDVSDNVLVALRRPPWLVAAANMMVVVHVLGSYQVYAMPIFETLETILITRIRLPPGALLRLVARSAYVAFTLFVAVTFPFFGDLLGFFGGFGFTPTSYFLPCILWLKIKKPPRFSASWFANWGCIVVGVLLMIASTIGGLRSIIQDASTFQFYS

SEQ ID NO: 314 - protein, 484 aa, Oryza sativa subsp. japonica
  misc_feature: Public GI ID no.125590641
  misc_feature: Score of 165.3 for HMM of FIGURE 5.
  misc_feature (62)..(471): Pfam Name: Aa_trans Pfam Description: Transmembrane amino acid transporter protein
  misc_feature: Functional Homolog Of Ceres SEEDLINE ID no. ME06123 at SEQ ID NO. 94
MEAYQTHPLIKAMVAGEKKGFADRKFAATVAVCVHRSDLSMVTSSVLPKVVDDAGEGEANPRRAKWWYATFHSVTAMVGAGVLSLPYAMAHLGWGPGTAALVVSWGMTLYTLRLLIELHECVPGVRFDRYRDLGAHALGPRLGPWLVVPQQLIVQLGCDVVYMVIGGKCLMKFAESVSSWSRAPQLHHQSYWICIFGASQFLLSQLPSLDSITAVSLAAAAMSVGYSTISWAACLARGTPAAAEGGGGGVSYAYKDGTAADSVFRVCSALGQVAFAYAGHGVVLEIQATIPSTPTKPSRGAMWKGAVAAYLVTALCYFPVAIAGYWAFGRDVSDNVLVALRRPPWLVAAANMMVVVHVLGSYQVYAMPIFETLETILITRIRLPPGALLRLVARSAYVAFTLFVAVTFPFFGDLLGFFGGFGFTPTSYFLPCILWLKIKKPPRFSASWFANWGCIVVGVLLMIASTIGGLRSIIQDASTFQFYS

SEQ ID NO: 315 - protein, 446 aa, Arabidopsis thaliana
  misc_feature: Public GI ID no.2576361
  misc_feature: Score of 183.6 for HMM of FIGURE 5.
  misc_feature (34)..(433): Pfam Name: Aa_trans Pfam Description: Transmembrane amino acid transporter protein
  misc_feature: Functional Homolog Of Ceres SEEDLINE ID no. ME06123 at SEQ ID NO. 94
MVAQAPHDDHQDDEKLAAARQKEIEDWLPITSSRNAKWWYSAFHNVTAMVGAGVLGLPYAMSQLGWGPGIAVLVLSWVITLYTLWQMVEMHEMVPGKRFDRYHELGQHAFGEKLGLYIVVPQQLIVEIGVCIVYMVTGGKSLKKFHELVCDDCKPIKLTYFIMIFASVHFVLSHLPNFNSISGSFSCCCRYVSQLLNNRMGIISKQRCSRRRSIRLQSENNSRYVFNFFSGLGDVAFAYAGHNVVLEIQATIPSTPEKPSKGPMWRGVIVAYIVVALCYFPVALVGYYIFGNGVEDNILMSLKKPAWLIATANIFVVIHVIGSYQIYAMPVFDMMETLLVKKLNFRPTTTLRFFVRNFYVAATMFVGMTFPFFGGLLAFFGGFAFAPTTYFLPCVIWLAIYKPKKYSLSWWANWVCIVFGLFLMVLSPIGGLRTIVIQAKGYKFYS

SEQ ID NO: 316 - protein, 456 aa, Arabidopsis thaliana
  misc_feature: Public GI ID no.21593132
  misc_feature: Score of 1128.1 for HMM of FIGURE 5.
  misc_feature (36)..(442): Pfam Name: Aa_trans Pfam Description: Transmembrane amino acid transporter protein
  misc_feature: Functional Homolog Of Ceres SEEDLINE ID no. ME06123 at SEQ ID NO. 94
MSPAPSTDPQPISGKKNGGDGGRIPVEEWLPITESRKGNVYTATFHLLCSGIGLQVILLPAAFAALGWVWGTIILTVGFVWKLYTTWLLVQLHEAVPGIRISRYVRLAIASFGVKLGKLLGIFPVMYLSGGACTILVITGGKSIQQLLQIMSDDNTAPLTSVQCFLVFSCIAMIMSQFPNLNSLFGVSLIGAFMGIAYCTVIWILPVASDSQRTQVSVSYATMDKSFVHIFNAIGLIALVYRGNNLVLEIQGTLPSDSKNPSCKTMWRAVMISHALVAICMFPLTFVVYWAYGDKIPATGGPVGNYLKLYTQEHSKRAACFIHLTFIFSCLCSYPINLMPACDNIEMVYITKKKKPASIIVRMMLRVFLSLVCFTIAVGFPFLPYLAVLIGAIALLVTFTYPCFMWISIKKPQRKSPMWLFNVLVGCLGASLSVLLLVASAMRLAQKGLHANFFRP

SEQ ID NO: 317 - DNA, 1572 bp, Arabidopsis thaliana
  misc_feature: Ceres CLONE ID no.36461
  misc_feature: Encodes the peptide sequence at SEQ ID NO 318
aattatttgatttggaatcacaagaaagtggtggttctcctttatttatgtcaccagccccctccacggatccacaaccaatctccggcaaaaaaaacggcggcgatggtggtaggattccggtagaagagtggctgccgatcacagaatcaagaaaaggaaatgtttatacggcgacgtttcatcttctctgttcgggaattggtctccaagtgattcttcttcctgcagctttcgcagcactcggatgggtatggggaacgataatcttaacggtagggtttgtatggaagctctacacgacgtggcttcttgttcaactccacgaagcggttccgggaattcgtatcagcagatacgtgagactcgcaattgcttcttttggtgtgaagcttgggaaacttctcggaatattccctgtgatgtatctctcaggaggagcttgtacgattctggttataaccggagggaaatcaatacaacaactgttacaaattatgtctgacgacaatacagcgccacttacttcagtgcaatgcttcttggtttttagttgcattgcgatgatcatgtctcagtttccgaatctaaattctctctttggagtctcgttgatcggtgcttttatgggaattgcgtattgcaccgtgatatggattttacctgtagctagtgactcacaaaggactcaagtcagtgtctcgtacgctacaatggataaaagtttcgttcacattttcaacgctattggattgatagctctagtatatcgcgggaacaatctcgtccttgagatacagggtactcttccttccgattcaaagaacccttcatgtaagacaatgtggagagcagtgatgatctctcatgctctcgtcgcgatttgtatgtttccattaacgtttgttgtatattgggcatacggagacaagattccggcgacgggaggtcccgtgggcaactatctgaaactttacacacaagagcactcgaagcgagcagcctgtttcatacacctcacgtttatcttctcttgcttatgttcatatccgataaacttaatgccggcgtgtgacaacatagagatggtgtacataaccaagaagaaaaagcctgcatccatcattgtccggatgatgttgcgtgtgtttttgagcttggtttgtttcactatagccgttggattcccgttcttgccttatctagcggttcttattggagcaatagccttgcttgtgacgtttacgtatccatgtttcatgtggatctctatcaaaaagccccaaaggaaaagcccaatgtggttgtttaacgttttggtgggttgcctaggtgcttctctcagcgttttgcttctggttgcctcggctatgcgtttggctcaaaagggtttgcatgctaacttcttcagaccctaaagcatccttgcaatcgttagaatgtaattagaatttgtggcacacgtggtaaacttgggactactaacatgttcagttgaaatatttaaattttgtaattatgatattttaatgtatacttctctcaaaaaagagaaaatcgtcagttgatgac

SEQ ID NO: 318 - protein, 456 aa, Arabidopsis thaliana; identical to SEQ ID NO: 316
  misc_feature: Ceres CLONE ID no.36461
  misc_feature: Score of 1128.1 for HMM of FIGURE 5.
  misc_feature (36)..(442): Pfam Name: Aa_trans Pfam Description: Transmembrane amino acid transporter protein
  misc_feature: Functional Homolog Of Ceres SEEDLINE ID no. ME06123 at SEQ ID NO. 94

SEQ ID NO: 319 - protein, 473 aa, Arabidopsis thaliana
  misc_feature: Public GI ID no.4455344
  misc_feature: Score of 1041.6 for HMM of FIGURE 5.
  misc_feature (58)..(459): Pfam Name: Aa_trans Pfam Description: Transmembrane amino acid transporter protein
  misc_feature: Functional Homolog Of Ceres SEEDLINE ID no. ME06123 at SEQ ID NO. 94
MSIALGNLFDLESQESGGSPLFMSPAPSTDPQPISGEKNGGDGGRIPVEEWLPITESRKGNVYTATFHLLCSGIGLQVILLPAAFAALGWVWGTIILTVGFVWKLYTTWLLVQLHEAVPGIRISRYVRLAIASFGGACTILVITGGKSIQQLLQIMSDDNTAPLTSVQCFLVFSCIAMIMSQFPNLNSLFGVSLIGAFMGIAYCTVIWILPVASDSQRTQVSVSYATMDKSFVHIFNAIGLIALVYRGNNLVLEIQVLTNSQLKHDLDGTLPSDSKNPSCKTMWRAVMISHALVAICMFPLTFAVYWAYGDKIPATGGPVGNYLKLYTQEHSKRAACFIHLTFIFSCLCSYPINLMPACDNIEMVYITKKKKPASIIVRMMLRVFLSLVCFTIAVGFPFLPYLAVLIGAIALLVTFTYPCFMWISIKKPQRKSPMWLFNVLVGCLGASLSVLLLVASAMRLAQKGLHANFFRP

SEQ ID NO: 320 - DNA, 1368 bp, Populus balsamifera subsp. trichocarpa
  misc_feature: Ceres ANNOT ID no.1450630
  misc_feature: Encodes the peptide sequence at SEQ ID NO 321
atgcctcttacagaatcgagaaatggcaatgtcgctactgcagtgttccatttgttatcttcaggaatcggaatccaggcccttctacttccagtagctttcgccactctcggatgggtatggggggcaataagcttgtccctagcatttacatggcagctctacaccatatggactcttgttcaactgcacgaaccaattcctggaattagaactcgctacagcagatatttacagcttgctatagccgcctttggtccaaagcttggaaagttgctagcaatatttccggtaatgtacctctcagggagcacatgtatcatgctgattataaaaggagctggagttatggagctgctattcaagctaatgtgtgaaggtggggctacatgcgatgccaagtctttgaccggggcagagtggttcctggtcttcacttgcatggctatagcattggctcagcgacctaacttgaattccattgctgggttctcactagttggtgccatgagtgccattgggtattgtactctgatttgggcactgcccatttccaaggacaggcccagtggcgtgtcttatgactcacgcaaggggggatctaccatggctggaatgtttgatgtcttgaatgcaattggtataattgtgcttgctttcagggggcataatcttgtgcttgagattcagggaacattgccttcaagcttaacaaatccatccaaaaggacgatgtggagaggggtgagtgtctcgtacatcataatagccatgtgtcagtttcctctagcaatagctggattttgggcttatggaaacaagcatcatggggaatcttttgcatgtgctaattatttgctaccgctttggcagataccttcgaatggagggatgttgactgcatttatgcagttccatggacacgacacatcaagatttgcgaagggccttgtatacttgctagtagtgattaactgccttagttcattccaaatctacgccatgccagttttcgacaacctggaatttaggtacattagcatgaagaacaggcgatgcccatggtgggttcgcattggttttcggctcttcttcggaggattggccttcttcatagctgtggctcttccttttctgccaagcctagctcctttagttggagggatcaccttacccttaacactggcttatccatgtttcatgtggatcttgattaagaaaccccatcaaaaaggtcacgatgccttgtggtgtcttaatctaggacttggatgcttaggcattgttctaagtgttctattggtagttgccgcagcatggaatttggctatcaaaggcctacatgccagcttcttcaaacccctatga

SEQ ID NO: 321 - protein, 455 aa, Populus balsamifera subsp. trichocarpa
  misc_feature: Ceres ANNOT ID no.1450630
  misc_feature: Score of 968.3 for HMM of FIGURE 5.
  misc_feature (7)..(444): Pfam Name: Aa_trans Pfam Description: Transmembrane amino acid transporter protein
  misc_feature: Functional Homolog Of Ceres SEEDLINE ID no. ME06123 at SEQ ID NO. 94
MPLTESRNGNVATAVFHLLSSGIGIQALLLPVAFATLGWVWGAISLSLAFTWQLYTIWTLVQLHEPIPGIRTRYSRYLQLAIAAFGPKLGKLLAIFPVMYLSGSTCIMLIIKGAGVMELLFKLMCEGGATCDAKSLTGAEWFLVFTCMAIALAQRPNLNSIAGFSLVGAMSAIGYCTLIWALPISKDRPSGVSYDSRKGGSTMAGMFDVLNAIGIIVLAFRGHNLVLEIQGTLPSSLTNPSKRTMWRGVSVSYIIIAMCQFPLAIAGFWAYGNKHHGESFACANYLLPLWQIPSNGGMLTAFMQFHGHDTSRFAKGLVYLLVVINCLSSFQIYAMPVFDNLEFRYISMKNRRCPWWVRIGFRLFFGGLAFFIAVALPFLPSLAPLVGGITLPLTLAYPCFMWILIKKPHQKGHDALWCLNLGLGCLGIVLSVLLVVAAAWNLAIKGLHASFFKPL

SEQ ID NO: 322 - protein, 513 aa, Lilium longiflorum
  misc_feature: Public GI ID no.452593
  misc_feature: Score of 1181.8 for HMM of FIGURE 5.
  misc_feature (89)..(495): Pfam Name: Aa_trans Pfam Description: Transmembrane amino acid transporter protein
  misc_feature: Functional Homolog Of Ceres SEEDLINE ID no. ME06123 at SEQ ID NO. 94
MEVQSMPVTPRSGTPRVTPPISAPPSQLHSPSLTRSPLLGPATPRASRLTPLASPIRKAIVSMRGYLEEVGHVTRLDPQDEWLPITQSRNGNSYYSAFHTLSSGIGFQALVVPVAFTFLGWLWGIVLLSVGFCWQLYTLWLLVELHESVPGTRYSRYLHLAKDTFGEKLGKFMALVPIIYLSAGTCSALIIVGGSTMKGFFQIVCGPTCRYMPLTTVEWYLVFVCLAVVLAQLPHLNSIAGVSLIGAVTAVTYCTMIWVISVRKGKIPNISYEAVDTSWDVARVLSILNAIGIIAFAFRGHNLVLEIQGTMPSTQKHPARVPMWRGVKVAYVLIAFCLFPVALIGFWSYGNQIPPNGVLTALNQFHSHDTSRTILGLTTLLVVINCLSSFQIYAMPIFDNMEAGYTSKKNKPCPQWLRSGFRAFFGAVAFLISSAFPFLPQLAGLIGAVALPVTFAYPCFMWIVIKKPERFGVMWWLNWCLGCLGMGLSVVLVVAGVWRLVETGVNISFFDPQ

SEQ ID NO: 323 - DNA, 1581 bp, Populus balsamifera subsp. trichocarpa
  misc_feature: Ceres ANNOT ID no.1495347
  misc_feature: Encodes the peptide sequence at SEQ ID NO 324
atggaagagaaaaaggaaatgaaattcgtgagacctgaaagtttgaatgttggggcagaaattcctgcaatttctgcacctccatttcagctccactgtccttcaatgacgaggtcaccattgctagacatagctcccaaaactcccaaaacacccaaaagtcccttagcttcgcttctgatgactactcctatagccagccccatgaagaaggcaattgcaagcatgcaatgttacttagaagaagttggccacttcactaagcttgatccccaggatgcatggcttcccataaccgagtctagaaatggtaacgcatactactcggcatttcacacattgagctcaggaattggagttcaagcccttcttcttccacttgctttcaccactcttagctggacttggggaattctatgtctatctctagtgttcatgtggcaactatacactctatggctactgattcagctacatgaatccgagtccgggatgcgttatagccgatatctccggctatcaatggctgcctttggtgaaaagctggggaagcttcttgctctcttcccagtcatgtatctatcaggtggaacctgtgtgaccttgattatgataggtggtggaaccatgaaaatatttttccaaattgtctgtggagatacatgcagcatgaggccattagcaacaatagagtggtacttcctgttcgtttgtttggcaattattctagctcagctccccaacttaaattctatagctggagtttccctgattggagcaatcacagccattagctactgtacactgatatgggtagtgtccattattcaaggtaggcctgagggtgtatcctatgaccctccggagacaaaatccgacatggctagaatttgtgacattctaaatgcacttgggataatcgccttcgctttcagaggtcacaatcttgtgctcgaaatacaggggaccatgccttccagtgcaaagcaaccatcccgtaagccaatgtggagaggagtaaagttggcatatgtgatcatagcgatgtgtttgtttcctcttgcaataggaggctattgggcctatggtaacttgatgccaaacggagggatgctcaatgctctacacaaatatcacggacacagcacctctaagttgctactaggattaacaagcctattcgttgtgcttaactgcctcagctcatttcagatatatgcaatgccagtgttcgacaatctggagctcagattcaccagcaaaatgaagaaaccatgtccctggtggttgcgcatagtgttcaggatcttctttggatgcttggcattttttatatcagtggcacttcctttcttgatgagtttggcaggattgattggaggggttgcactcccagttaccttagcatatccatgtttcatgtggatactcattaaaaaacccacaaaatacagtgcaatctggtgcctgaattggatactgggagtcttggggatggtgcttagcatgctagttatagctggagcaatatggactattgtgaccatgggtatcgaaattcacttcttcaagccccagtaa

SEQ ID NO: 324 - protein, 491 aa, Populus balsamifera subsp. trichocarpa
  misc_feature: Ceres ANNOT ID no.1495347
  misc_feature: Score of 1078.0 for HMM of FIGURE 5.
  misc_feature (67)..(476): Pfam Name: Aa_trans Pfam Description: Transmembrane amino acid transporter protein
  misc_feature: Functional Homolog Of Ceres SEEDLINE ID no. ME06123 at SEQ ID NO. 94
MTRSPLLDIAPKTPKTPKSPLASLLMTTPIASPMKKAIASMQCYLEEVGHFTKLDPQDAWLPITESRNGNAYYSAFHTLSSGIGVQALLLPLAFTTLSWTWGILCLSLVFMWQLYTLWLLIQLHESESGMRYSRYLRLSMAAFGEKLGKLLALFPVMYLSGGTCVTLIMIGGGTMKIFFQIVCGDTCSMRPLATIEWYFLFVCLAIILAQLPNLNSIAGVSLIGAITAISYCTLIWVVSIIQGRPEGVSYDPPETKSDMARICDILNALGIIAFAFRGHNLVLEIQGTMPSSAKQPSRKPMWRGVKLAYVIIAMCLFPLAIGGYWAYGNLMPNGGMLNALHKYHGHSTSKLLLGLTSLFVVLNCLSSFQIYAMPVFDNLELRFTSKMKKPCPWWLRIVFRIFFGCLAFFISVALPFLMSLAGLIGGVALPVTLAYPCFMWILIKKPTKYSAIWCLNWILGVLGMVLSMLVIAGAIWTIVTMGIEIHFFKPQ

SEQ ID NO: 325 - DNA, 1647 bp, Populus balsamifera subsp. trichocarpa
  misc_feature: Ceres ANNOT ID no.1442446
  misc_feature: Encodes the peptide sequence at SEQ ID NO 326
atggaagagaaaaaggaaatgaaattcgtgagacctgaaagtttgaatgttggggcagaaattcctgcaatttctgcacctccatttcagctccactgtccttcaatgacgaggtcaccattgctagacatagctcccaaaactcccaaaacacccaaaagtcccttagcttcgcttctgatgactactcctatagccagccccatgaagaaggcaattgcaagcatgcaatgttacttagaagaagttggccacttcactaagcttgatccccaggatgcatggcttcccataaccgagtctagaaatggtaacgcatactactcggcatttcacacattgagctcaggaattggagttcaagcccttcttcttccacttgctttcaccactcttagctggacttggggaattctatgtctatctctagtgttcatgtggcaactatacactctatggctactgattcagctacatgaatccgagtccgggatgcgttatagccgatatctccggctatcaatggctgcctttggtgaaaagctggggaagcttcttgctctcttcccagtcatgtatctatcaggtggaacctgtgtgaccttgattatgataggtggtggaaccatgaaaatatttttccaaattgtctgtggagatacatgcagcatgaggccattagcaacaatagagtggtacttcctgttcgtttgtttggcaattattctagctcagctccccaacttaaattctatagctggagtttccctgattggagcaatcacagccattagctactgtacactgatatgggtagtgtccattattcaaggtaggcctgagggtgtatcctatgaccctccggagacaaaatccgacatggctagaatttgtgacattctaaatgcacttgggataatcgccttcgctttcagaggtcacaatcttgtgctcgaaatacaggggaccatgccttccagtgcaaagcaaccatcccgtaagccaatgtggagaggagtaaagttggcatatgtgatcatagcgatgtgtttgtttcctcttgcaataggaggctattgggcctatggtaacttgatgccaaacggagggatgctcaatgctctacacaaatatcacggacacagcacctctaagttgctactaggattaacaagcctattcgttgtgcttaactgcctcagctcatttcagatatatgcaatgccagtgttcgacaatctggagctcagattcaccagcaaaatgaagaaaccatgtccctggtggttgcgcatagtgttcaggatcttctttggatgcttggcattttttatatcagtggcacttcctttcttgatgagtttggcaggattgattggaggggttgcactcccagttaccttagcatatccatgtttcatgtggatactcattaaaaaacccacaaaatacagtgcaatctggtgcctgaattggatactgggagtcttggggatggtgcttagcatgctagttatagctggagcaatatggactattgtgaccatgggtatcgaaattcacttcttcaagccccaatggatgaaataccttcaggagcggcaagcacagccactgcttgaagaatctccccacgcaccaacttaa

SEQ ID NO: 326 - protein, 513 aa, Populus balsamifera subsp. trichocarpa
  misc_feature: Ceres ANNOT ID no.1442446
  misc_feature: Score of 1078.0 for HMM of FIGURE 5.
  misc_feature (67)..(476): Pfam Name: Aa_trans Pfam Description: Transmembrane amino acid transporter protein
  misc_feature: Functional Homolog Of Ceres SEEDLINE ID no. ME06123 at SEQ ID NO. 94
MTRSPLLDIAPKTPKTPKSPLASLLMTTPIASPMKKAIASMQCYLEEVGHFTKLDPQDAWLPITESRNGNAYYSAFHTLSSGIGVQALLLPLAFTTLSWTWGILCLSLVFMWQLYTLWLLIQLHESESGMRYSRYLRLSMAAFGEKLGKLLALFPVMYLSGGTCVTLIMIGGGTMKIFFQIVCGDTCSMRPLATIEWYFLFVCLAIILAQLPNLNSIAGVSLIGAITAISYCTLIWVVSIIQGRPEGVSYDPPETKSDMARICDILNALGIIAFAFRGHNLVLEIQGTMPSSAKQPSRKPMWRGVKLAYVIIAMCLFPLAIGGYWAYGNLMPNGGMLNALHKYHGHSTSKLLLGLTSLFVVLNCLSSFQIYAMPVFDNLELRFTSKMKKPCPWWLRIVFRIFFGCLAFFISVALPFLMSLAGLIGGVALPVTLAYPCFMWILIKKPTKYSAIWCLNWILGVLGMVLSMLVIAGAIWTIVTMGIEIHFFKPQWMKYLQERQAQPLLEESPHAPT

SEQ ID NO: 327 - DNA, 1906 bp, Glycine max
  misc_feature: Ceres CLONE ID no.573806
  misc_feature: Encodes the peptide sequence at SEQ ID NO 328
atcttcaaagctaagacgtaaagtagtaagcagtttcatcattttttctttttttctctcttttggtacattggaaagaaagaaaggaagcttcaatttcttccaataaagcgtgttttagaacgtgcttttaaggtatatatatatatatataactacatataccaaaaaactgatttgcagctgaaattgctttcgttcattagtatttagtttttcacaagctagggaagacatgggagaagtggctgatgaaggtcaatatttcagatcagaaatagctctattgaattactcggatgcaaccttcaaacccccactttcttctctgttgatacacattgatccactcataatacccaatggccacacttgttctgcatcagaatctgatccatcacccacttctcagcaccatcagcaggagcagcatcccaaagatgcctggcttccaatcactgaatcaagaaatggaaatgcctattatgcagcctttcatattcttaattccaacattggattccaggctctcatgcttcccgttgccttcgccactcttggttgggcatggggtacagtatgtttgtcactagcatttgtttggcaactctatgccatatttcttcttgttcagcttcacgaatccgtccccggaattcgtcacagcagatacctcttccttgccatggctgccttcggtaaaaagttagggaaggtggcagcattattcccggtaatgtacctttcaggaggcacatgcgtcatgataatcatcaccggtggtgggaccctgaaacaattattgaagacgctttgcgacaacgatgatcatgttcatgagcaaataacatgtaatgcccacgcgcttagcggggctgagtggttcttggtgtttacctgtgtcgccattctcattgcacagttgcccaacctcaactcaatggccatggtttctctcgtcggcgccgttacctccgttacttattgcaccctcttttgggttctctctgttaagaatggtaggcccaacaacgtatcctatagctcatccctgcagtcccaagaacacacaccagtggctaagatcaatggcgttctcaatgccattggaatcattgtgctagccttcagaggacacaatgttttgcccgaaatacaggggacgctgccttcaaatttcgaacaaacatccaaaagaccaatgcgaagaggagttagcatatcatatgtactcatttccatgtgcatgtttcccctcgcaattgccggattttgggcctatggaaaccagataaatgacgggggattgttaacttcgttcccacaattccacaagaggcaaatcacaaaattctctatgggtgcaatatatgttctagtaataatacattgtttaaccagctttcaaatatatgcgatgcctgtttttgacaacctggagataagatacacgagcataaagaatcagagatgtccacgattggtgagaacatgcataagactattctttggggggttgacattttttatttcggtcacgttcccattccttccacgcctatcagcactactcggaagcatgacccttgtgcccattacatatgcatacccttgtttcatgtggctatccctcaagaagcctcgtccaagaggttttgtttggtgcttcaacgttgcactcggttgtgtagggatgcttctcagtgctcttttggtagctgcagctatacggactctagctctcaatggcctagatgctaacttcttcaaaccataacaattaatattatgccatccaacagcaactagtatattgccaacaatttattttaatctactgttagtgatatacagaaaatcatttttgaacatgatactccagtaatacaaacgttaagttttgaat

SEQ ID NO: 328 - protein, 513 aa, Glycine max
  misc_feature: Ceres CLONE ID no.573806
  misc_feature: Score of 808.7 for HMM of FIGURE 5.
  misc_feature (78)..(499): Pfam Name: Aa_trans Pfam Description: Transmembrane amino acid transporter protein
  misc_feature: Functional Homolog Of Ceres SEEDLINE ID no. ME06123 at SEQ ID NO. 94
MGEVADEGQYFRSEIALLNYSDATFKPPLSSLLIHIDPLIIPNGHTCSASESDPSPTSQHHQQEQHPKDAWLPITESRNGNAYYAAFHILNSNIGFQALMLPVAFATLGWAWGTVCLSLAFVWQLYAIFLLVQLHESVPGIRHSRYLFLAMAAFGKKLGKVAALFPVMYLSGGTCVMIIITGGGTLKQLLKTLCDNDDHVHEQITCNAHALSGAEWFLVFTCVAILIAQLPNLNSMAMVSLVGAVTSVTYCTLFWVLSVKNGRPNNVSYSSSLQSQEHTPVAKINGVLNAIGIIVLAFRGHNVLPEIQGTLPSNFEQTSKRPMRRGVSISYVLISMCMFPLAIAGFWAYGNQINDGGLLTSFPQFHKRQITKFSMGAIYVLVIIHCLTSFQIYAMPVFDNLEIRYTSIKNQRCPRLVRTCIRLFFGGLTFFISVTFPFLPRLSALLGSMTLVPITYAYPCFMWLSLKKPRPRGFVWCFNVALGCVGMLLSALLVAAAIRTLALNGLDANFFKP

SEQ ID NO: 329 - protein, 512 aa, Oryza sativa subsp. japonica; identical to SEQ ID NO: 98
  misc_feature: Public GI ID no.115459914
  misc_feature: Score of 1401.5 for HMM of FIGURE 5.
  misc_feature (84)..(489): Pfam Name: Aa_trans Pfam Description: Transmembrane amino acid transporter protein
  misc_feature: Functional Homolog Of Ceres SEEDLINE ID no. ME06123 at SEQ ID NO. 94

SEQ ID NO: 330 - protein, 508 aa, Oryza sativa subsp. indica
  misc_feature: Public GI ID no.116310155
  misc_feature: Score of 1380.7 for HMM of FIGURE 5.
  misc_feature (80)..(485): Pfam Name: Aa_trans Pfam Description: Transmembrane amino acid transporter protein
  misc_feature: Functional Homolog Of Ceres SEEDLINE ID no. ME06123 at SEQ ID NO. 94
MSSEVTSVPPPPVSAPPSQIQSPAAPASSRASPLRGMGTPNIASPVRKAVASVSGYLGEVGQMTRLADPRDAWLPITESRSGNAYYAAFHSFSSGIGFQALVLPVAFSLLGWTWAIICLTVAFAWQLYTLWLLVKLHEPVAGGTRYSRYMYLATTVFGEKWGKILALLPVMYLSAGTCTALIIVGGGSMKLLFNIACGEVCLARPLTTVEWYLVFVCVAALLSQLPNLNSIAGVSLVGATAAVAYCTMIWVVSVAKGRVAGVSYDPVRATDEEDGAIGILNGLGIIAFAFRGHNLVLEIQATMPSTLKHPSHVPMWKGVKAAYVIIALCLYPVAVGGFWAYGDQIPPNGIVSALYKFHSQDVSRVVLGTATLLVIVNCLTTYQIYAMPVFDNMETGYVHKKNRPCPWWMRAGFRALFGAINLLIAVALPFLSELAGLLGGISLPVTLAYPCFMWVAIMRPAKGTAMWYTNWGLGSLGMGLSFVLIVGNLWGLVEKGLHVKFFKPADFQ

SEQ ID NO: 331 - protein, 508 aa, Oryza sativa subsp. japonica
  misc_feature: Public GI ID no.115488592
  misc_feature: Score of 941.2 for HMM of FIGURE 5.
  misc_feature (83)..(496): Pfam Name: Aa_trans Pfam Description: Transmembrane amino acid transporter protein
  misc_feature: Functional Homolog Of Ceres SEEDLINE ID no. ME06123 at SEQ ID NO. 94
MAMAVEGAGAGVVVSEPEVVSIPPTPRGMSTPDGTATPPPAAGRGAATPARRVVEGLRGYLEEVGHLTRLNPQDAWLPITESRSGNARYAAFHTLNAGLGFQALLLPLAFPALGWSWGIISLTVAYFWQLYTLWILVKLHEAVPGRRYNRYVELAQAAFGEKLGMWLSLFPTIYLSAGSATALILVGGETMKLFYQIVCGPICSPSPISTIEWYLVFTSLAIVLSQLPNLNSIAGVSLIGGTTAITYCTMSWVLSVSQPQPPTVSYEPQAYTSLGSSLFSTLNALGIIAFAFRGHNLALEIQATMPSTFKHPAHVPMWRGAKVAYALIAMCLFPVAIGGYWAYGNMVPQGGMLTALYAFHSHDIPRGLLAATFLLVVFNCLSSFQIYSMPVFDSFEAAYTGRTNRPCSVWVRSGFRVFYGFLSLFISVALPFLSSLAGLLGGLTLPVTFAYPCFMWICIKKPERFSSGWYLNWGLGLLGTAFSLALCVGGVWSIISSGMKFKFFKPPS

SEQ ID NO: 332 - protein, 519 aa, Arabidopsis thaliana
  misc_feature: Public GI ID no.15220283
  misc_feature: Score of 971.0 for HMM of FIGURE 5.
  misc_feature (94)..(507): Pfam Name: Aa_trans Pfam Description: Transmembrane amino acid transporter protein
  misc_feature: Functional Homolog Of Ceres SEEDLINE ID no. ME06123 at SEQ ID NO. 94
MDERPETELISIPATPRVSTPEILTPSGQRSPRPATKPSSATWTPTSFISPRFLSPIGTPMKRVLVNMKGYLEEVGHLTKLNPQDAWLPITESRNGNAHYAAFHNLNAGVGFQALVLPVAFAFLGWSWGILSLTIAYCWQLYTLWILVQLHEAVPGKRYNRYVELAQAAFGERLGVWLALFPTVYLSAGTATALILIGGETMKLFFQIVCGPLCTSNPLTTVEWYLVFTSLCIVLSQLPNLNSIAGLSLIGAVTAITYSTMVWVLSVSQPRPATISYEPLSMPSTSGSLFAVLNALGIIAFAFRGHNLVLEIQSTMPSTFKHPAHVPMWRGAKISYFLIALCIFPISIGGFWAYGNLMPSGGMLAALYAFHIHDIPRGLLATAFLLVVFSCLSSFQIYSMPAFDSFEAGYTSRTNKPCSIWVRSGFRVFFGFVSFFIGVALPFLSSLAGLLGGLTLPVTFAYPCFMWVLIKKPAKYSFNWYFHWGLGWLGVAFSLAFSIGGIWSMVTNGLKLKFFKPPN

SEQ ID NO: 333 - protein, 519 aa, Arabidopsis thaliana
  misc_feature: Public GI ID no.5688864
  misc_feature: Score of 966.0 for HMM of FIGURE 5.
  misc_feature (94)..(507): Pfam Name: Aa_trans Pfam Description: Transmembrane amino acid transporter protein
  misc_feature: Functional Homolog Of Ceres SEEDLINE ID no. ME06123 at SEQ ID NO. 94
MDERPETELISIPATPRVSTPEILTPSGQRSPRPATKPSSATWTPTSFISPRFLSPIGTPMKRVLVNMKGYLEEVGHLTKLNPQDAWLPITESRNGNAHYAAFHNLNAGVGFQALVLPVAFAFLGWSWGILSLTIAYCWQLYTLWILVQLHEAVPGKRYNRYVELAQAAFGERLGVWLALFPTVYLSAGTATALILIGGETMKLFFQIVCGPLCTSNPLTTVEWYLVFTSLCIVLSQLPDLNSIAGLSLIGAVTAITYSTMVWVLSVSQPRPATISYEPLSMPSTSGSLFAVLNALGIIAFAFRGHNLVLEIQSTMPSTFKHPAHVPMWRGAKISYFLIALCIFPISIGGFWAYGNLMPSGGMLAALYAFHIHDIPRGLLATAFLLVVFSCLSSFQIYSMPAFDSFEAGYTSRTNKPCSIWVRSGFRVFFGFVSFFIGVALPFLSSLAGLLGGLTLPVTFAYPCFMWVLIKKPAKYSFNWYFHWGLGWLGVAFSLAFSIGGIWSMVTNGLKLKFFKPPN

SEQ ID NO: 334 - DNA, 1566 bp, Populus balsamifera subsp. trichocarpa
  misc_feature: Ceres ANNOT ID no.1539815
  misc_feature: Encodes the peptide sequence at SEQ ID NO 335
atggaggagagaccagagacggagttaatatccattccagcaacgccacgtgcatcgacgccagagatactgactccttcaggtcagaggtcaccaaggccagcttcaaaggaagcgaaatcatcgacagcatggacaccgacatcgtttatctcgccgaggtttttgagcccaatagggacgccaatgaagagggtgttgattaacatgaagggttatttagaggaagtgggtcatttgactaagctaaatccgcaagatgcttggcttcctatcaccgagtctcgtaatgggaatgctcattatgcggcgtttcataacttgaatgccggtgttgggtttcaagcccttgttttgcctgttgcctttgcttttcttggctggagttggggaatactgtccttaaccatagcctactgctggcaactttacactctatggattctggttcagctgcatgaagctgttcccgggaagagatacaacagatatgtggagcttgcacaagctgcattcggggaaagattaggcctctggcttgcgctcttcccaacagtttatttgtcagctggaaccgcaacagctttgattcttataggaggggagacaatgaaattattcttccaaatagtttgtgggccactctgttcatcaaatcccctaacaacagttgagtggtacctggtattcacttctctatgcatcgttctgtcccagctcccaaatctgaattcaattgcgggactttcactcatcggtgccataacagctatcacttactctaccatggtgtgggttctttctgttagccaacaaaggccacctacaatctcttatgaacccctttctttgccatcctttagtgcttctgtcttttcagtcatgaatgctcttgggattgttgcctttgctttcagagggcacaatctagccatggagattcaggcaacaatgccatcaacatttaagcacccagctcatgtgcccatgtggaaaggagccaaagttgcctatttctttattgctttgtgcctgtttccagtcgccattggaggcttttgggcttatgggaaccttatgccttcaggaggaattctcaatgccctgtatgggtttcacagccacgacattcctcgaggacttcttgcaatgacttttcttctcgtggtgttcaattgcctaagcagcttccagatatattcaatgcctgtttttgacagttttgaagctagctataccacccgaacaaaccgaccatgctccatttgggttcgatccggcttccgggtgttctatggattcatctctttcttcattggggtagcactccctttcctctccagtcttgctggtctcttaggaggattaacactcccagtcacattcgcttacccttgcttcatgtgggttctcataaaaaaaccttccaaatacagtttcaattggtacttcaactggatccttggttggttaggtattgcttttagcttggccttctccattggaggtgtctggagcatggtgaacagtggacttaaattaaaattcttcaagccaccaaattaa

SEQ ID NO: 335 - protein, 521 aa, Populus balsamifera subsp. trichocarpa
  misc_feature: Ceres ANNOT ID no.1539815
  misc_feature: Score of 953.2 for HMM of FIGURE 5.
  misc_feature (96)..(509): Pfam Name: Aa_trans Pfam Description: Transmembrane amino acid transporter protein
  misc_feature: Functional Homolog Of Ceres SEEDLINE ID no. ME06123 at SEQ ID NO. 94
MEERPETELISIPATPRASTPEILTPSGQRSPRPASKEAKSSTAWTPTSFISPRFLSPIGTPMKRVLINMKGYLEEVGHLTKLNPQDAWLPITESRNGNAHYAAFHNLNAGVGFQALVLPVAFAFLGWSWGILSLTIAYCWQLYTLWILVQLHEAVPGKRYNRYVELAQAAFGERLGLWLALFPTVYLSAGTATALILIGGETMKLFFQIVCGPLCSSNPLTTVEWYLVFTSLCIVLSQLPNLNSIAGLSLIGAITAITYSTMVWVLSVSQQRPPTISYEPLSLPSFSASVFSVMNALGIVAFAFRGHNLAMEIQATMPSTFKHPAHVPMWKGAKVAYFFIALCLFPVAIGGFWAYGNLMPSGGILNALYGFHSHDIPRGLLAMTFLLVVFNCLSSFQIYSMPVFDSFEASYTTRTNRPCSIWVRSGFRVFYGFISFFIGVALPFLSSLAGLLGGLTLPVTFAYPCFMWVLIKKPSKYSFNWYFNWILGWLGIAFSLAFSIGGVWSMVNSGLKLKFFKPPN

SEQ ID NO: 336 - protein, 545 aa, Oryza sativa subsp. japonica
  misc_feature: Public GI ID no.125591283
  misc_feature: Score of 1365.7 for HMM of FIGURE 5.
  misc_feature (84)..(522): Pfam Name: Aa_trans Pfam Description: Transmembrane amino acid transporter protein
  misc_feature: Functional Homolog Of Ceres SEEDLINE ID no. ME06123 at SEQ ID NO. 94
MSSEVTSVPPTPTPPPVSTPPSQIQSPAAPASSRASPLRGMGTPNIASPVRKAVASVSGYLGEVGQMTRLADPRDAWLPITESRSGNAYYAAFHSLSSGIGFQALVLPVAFSLLGWTWAIICLTVAFAWQLYTLWLLVKLHEPVAGGTRYSRYMYLATTVFGEKWGKILALLPVMYLSAGTCTALIIVGGGSMKLLFNIACGEVCLARPLTTVEWYLVFVCVAALLSQLPNLNSIAGVSLVGATAAVAYCTMIWVVSVAKGRVAGVSYDPVRTTDEEDGAIGILNGLGIIAFAFRGHNLVLEIQVKSLSHSFRLHSATDNDGKDKVTDECMFAINSQATMPSTLKHPSHVPMWKGVKAAYVIIALCLYPVAVGGFWAYGDQIPPNGILSALYKFHSQDVSRVVLGTATLLVIVNCLTTYQIYAMPVFDNMETGYVHKKNRPCPWWMRAGFRALFGAINLLIAVALPFLSELAGLLGGISLPVTLAYPCFMWVAIMRPAKGTAMWYTNWGLGSLGMGLSFVLIVGNLWGLVEKGLHVKFFKPADFQ

SEQ ID NO: 337 - protein, 541 aa, Oryza sativa subsp. indica
  misc_feature: Public GI ID no.125549341
  misc_feature: Score of 1350.0 for HMM of FIGURE 5.
  misc_feature (80)..(518): Pfam Name: Aa_trans Pfam Description: Transmembrane amino acid transporter protein
  misc_feature: Functional Homolog Of Ceres SEEDLINE ID no. ME06123 at SEQ ID NO. 94
MSSEVTSVPPPPVSAPPSQIQSPAAPASSRASPLRGMGTPNIASPVRKAVASVSGYLGEVGQMTRLADPRDAWLPITESRSGNAYYAAFHSLSSGIGFQALVLPVAFSLLGWTWAIICLTVAFAWQLYTLWLLVKLHEPVAGGTRYSRYMYLATTVFGEKWGKILALLPVMYLSAGTCTALIIVGGGSMKLLFNIACGEVCLARPLTTVEWYLVFVCVAALLSQLPNLNSIAGVSLVGATAAVAYCTMIWVVSVAKGRVAGVSYDPVRATDEEDGAIGILNGLGIIAFAFRGHNLVLEIQVKSLSHSFRLHSATDNDGKDKVTDECMFAINSQATMPSTLKHPSHVPMWKGVKAAYVIIALCLYPVAVGGFWAYGDQIPPNGILSALYKFHSQDVSRVVLGTATLLVIVNCLTTYQIYAMPVFDNMETGYVHKKNRPCPWWMRAGFRALFGAINLLIAVALPFLSELAGLLGGISLPVTLAYPCFMWVAIMRPAKGTAMWYTNWGLGSLGMGLSFVLIVGNLWGLVEKGLHVKFFKPADFQ

SEQ ID NO: 338 - DNA, 1871 bp, Triticum aestivum
  misc_feature: Ceres CLONE ID no.833489
  misc_feature: Encodes the peptide sequence at SEQ ID NO 339
acttctcctcgctctctctcacacacacagcgcgccgcgctccaagaacaagaagaagaacccactccaagtcgtccaagggagcatggcggcaatggcggagggggcgggggagccggagctggtgtcgatccccgtgacgccgcggggtctgtccacgccggaggggatgtccacgccgccggttaggaggggaggggcagcgacgagcggcgccgggacgccggtgcgccgggtggtggagggcctgcgcggctacctggaggaggtgggccacctcacgcgcctcaacccgcaggacgcctggctccccatcaccgagagccgcagcggcaacgccagctacgctgcattccactccctcaacgccggccttgggttccaggcgctcctcctcccactcgccttccccgccctcggatggagctggggaataatatcattgactggtgcttacttctggcaactgtacacactctccattctagtcaagcttcacgaagcagtcccgggcaggaggtacaacagatatgtggagcttgcacaagctgcatttggagaaaaactgggggtgtggctagctcttttcccaactatttatctttcggcaggcactgcaactgcattgatccttgtcggaggggagactatgaagctcttttaccaaatagtgtgcggccccctttgtacaccgagccctatttcgacggtggagtggtacttggtattcacatccttggcagtcattctttcccagctcccaaatctcaactcgattgctgggctttcgcttatcggtggcgccacagcgataatgtactgcaccatgtcatgggttctctctgtgagccagcaacggccggcagcagtctcttatgaacaagtgagatccacttcttttggctcatcactgttctctaccttgaatgctcttgggataatagcctttgcattcaggggacacaatctttcattagaaatacaggcgacgatgccgtcgactttcaaacaccctgcacatgtgcctatgtggcgcggggccaaagcggcttatcttctgattgcgatgtgcatcttccctgttgccattgggggttactgggcctacgggaacatgatgccaccaggagggatcctgaccgccctctacatcttccacggccacgacatctctcgtgggctcctcgcggcgacgttcctcctcgtcgtgttcaactgccttagcagcttccagatatactccatgccagtgttcgacagcttcgaggccttctacacaggtcgcaccaaccggccctgctcagtctgggtccggtccggattcaggatcttctacgggttcatctcgctcttcatcggcatcgctctgccgttcctctccagcctcgccggccttctgggcggcctaacgctgccggtgacgtttgcctacccgtgcttcatgtggatctgcatcaagaagcctgagaggttcagctacagctggtacgtgaactggggcctcgccctgctcggcaccgccttcagcttggcctcctctgtgggtggtgtctggagcatcattaacactgggatgaagctcaagttcttcaagcccaactagcatgtctactgttttcagcttgcaaatttatgatatataggtatatgcttcttatattacatgccttggcaagaccaatggcattaagtggtgtcgatcttatattagtagactttgtcttggtaaaatgtaagtatcccctgttggataagaaaaacacgagccgatgaaatgatcaaatctcgcagtggcaaccttatgaaggtcaaatgtaactcgaacaatttatataatgactatctctgtggtaacaaaaaaaaaaaaaaaa

SEQ ID NO: 339 - protein, 502 aa, Triticum aestivum
  misc_feature: Ceres CLONE ID no.833489
  misc_feature: Score of 923.9 for HMM of FIGURE 5.
  misc_feature (78)..(491): Pfam Name: Aa_trans Pfam Description: Transmembrane amino acid transporter protein
  misc_feature: Functional Homolog Of Ceres SEEDLINE ID no. ME06123 at SEQ ID NO. 94
MAEGAGEPELVSIPVTPRGLSTPEGMSTPPVRRGGAATSGAGTPVRRVVEGLRGYLEEVGHLTRLNPQDAWLPITESRSGNASYAAFHSLNAGLGFQALLLPLAFPALGWSWGIISLTGAYFWQLYTLSILVKLHEAVPGRRYNRYVELAQAAFGEKLGVWLALFPTIYLSAGTATALILVGGETMKLFYQIVCGPLCTPSPISTVEWYLVFTSLAVILSQLPNLNSIAGLSLIGGATAIMYCTMSWVLSVSQQRPAAVSYEQVRSTSFGSSLFSTLNALGIIAFAFRGHNLSLEIQATMPSTFKHPAHVPMWRGAKAAYLLIAMCIFPVAIGGYWAYGNMMPPGGILTALYIFHGHDISRGLLAATFLLVVFNCLSSFQIYSMPVFDSFEAFYTGRTNRPCSVWVRSGFRIFYGFISLFIGIALPFLSSLAGLLGGLTLPVTFAYPCFMWICIKKPERFSYSWYVNWGLALLGTAFSLASSVGGVWSIINTGMKLKFFKPN

SEQ ID NO: 340 - DNA, 1584 bp, Populus balsamifera subsp. trichocarpa
  misc_feature: Ceres ANNOT ID no.1450632
  misc_feature: Encodes the peptide sequence at SEQ ID NO 341
atgggtgaagttgttgatgcaaactctactcctgtgacaccaagaccagcctcagtggcaccaacgccaccgatatcagctcctccgtcgcaatttcattcaccgtcgttgtctagatcacctttgctcacacctgatcatattgttccaagcaaaacccccaaaaactcaaccccaagaaatgcaaccccaagaaatagaacacctcgctttattacccctataggtagtcctattagaagggctctcaagctcactagactagaccctgaagatgcttggcttcctatcaccgagtcccgaaatggaaacgcgtggtatgcagcgtttcattgcctttgctcaggaattggttttcaagcacttgtgctccctgtcgccttcactgtccttggctgggcatgggggatcatagccttgactgttgctttcgcatggcagctttacaccctttatttacttgtgcaactccatgaaaacactgaaactggcgttcgctacagcagatatcttcaaattatgagtgcaaatttcggtgagaagaaagcaaagtggctgggcctgttcccaatattgtacctatcaataggcacatgtgtggctctaaacataattggaggatcaacatcaaaattatttttccagactgtatgcggtcaatcatgcacagtcaaaacattaacaccagtggaatggtacctggtgtttgctagtgctgcagttcttctgtctcagctgccaaacttgaactcaatagctggtgtctccctaatcggatccatcacggctgttatgtactgcacaattatgtggatggtttctgttaacaaggacaggctgcctggaatttcatacaaaccagttcgcggaccaaaggaggttgataggctttttgaagttcttaacgcacttggcattgttgcttttgcatttagaggccacaatcttatacttgagatccaggctactatgccttcaagtgagaagcatccatctcgtgtgccaatgtggaggggtgccaaggctgcttatacagttattgcagcatgtatattcccccttgcaattggaggcttctgggcatacggtcaaaggataccaaaaaatggtggtttgcaatctgccttctatgcataccgaaggagagacacctcacaatttatcatgggactcgttagtttacttatcatagtaaatgctcttagctcattccaaatctacgccatgccaatgtttgatgagttagagtcaattttcactaagaggatgaagaggccatgccaatggtggctccgagtgattttgagggcgttcttcgggtatggggtcttctttttggccgtcgcaatcccatctattggaagtgtaggtggtctagtcggaggaatatcactgccagtcacattggcttatccatgcttcatgtggcttaagatgaggaaaccgaacaagtatagcaagatgtggtaccttaactggggactaggaatcattggtttgattcttagcgtgtgtttgatggctgctggagtatatgttatcaaagagaatgataataaattccagtggttcaagcctaagtaa

SEQ ID NO: 341 - protein, 527 aa, Populus balsamifera subsp. trichocarpa
  misc_feature: Ceres ANNOT ID no.1450632
  misc_feature: Score of 996.2 for HMM of FIGURE 5.
  misc_feature (101)..(516): Pfam Name: Aa_trans Pfam Description: Transmembrane amino acid transporter protein
  misc_feature: Functional Homolog Of Ceres SEEDLINE ID no. ME06123 at SEQ ID NO. 94
MGEVVDANSTPVTPRPASVAPTPPISAPPSQFHSPSLSRSPLLTPDHIVPSKTPKNSTPRNATPRNRTPRFITPIGSPIRRALKLTRLDPEDAWLPITESRNGNAWYAAFHCLCSGIGFQALVLPVAFTVLGWAWGIIALTVAFAWQLYTLYLLVQLHENTETGVRYSRYLQIMSANFGEKKAKWLGLFPILYLSIGTCVALNIIGGSTSKLFFQTVCGQSCTVKTLTPVEWYLVFASAAVLLSQLPNLNSIAGVSLIGSITAVMYCTIMWMVSVNKDRLPGISYKPVRGPKEVDRLFEVLNALGIVAFAFRGHNLILEIQATMPSSEKHPSRVPMWRGAKAAYTVIAACIFPLAIGGFWAYGQRIPKNGGLQSAFYAYRRRDTSQFIMGLVSLLIIVNALSSFQIYAMPMFDELESIFTKRMKRPCQWWLRVILRAFFGYGVFFLAVAIPSIGSVGGLVGGISLPVTLAYPCFMWLKMRKPNKYSKMWYLNWGLGIIGLILSVCLMAAGVYVIKENDNKFQWFKPK

SEQ ID NO: 342 - DNA, 1617 bp, Populus balsamifera subsp. trichocarpa
  misc_feature: Ceres ANNOT ID no.1460559
  misc_feature: Encodes the peptide sequence at SEQ ID NO 343
atgggtgaagttgttgatgcaaactctactcccgtgacaccaaggcctaatgtaaactctactcctgtaacaccaaggccagcctcagtgtcaccaacgccaccgatatcggctcctccgtcgcaatttcattcgccgtcgttgtctagatcacctttgctcacacctgatcatattgttccaagcaaaactccaaggaactcaaccccaagaaatgcaaccccaagacttagaactcctcgctttatgacccctttaggtagtcctcttagaagggctctccaactcacaaaacttgaccctcaagatgcttggcttccaattactgagtcccgaaatggaaacgcatggtatgcagcgtttcattgcctttgctctggcattggttttcaagcactcgtgctccctgtttccttcactgtccttggttgggcatggggcatcatagccttgacagttgcattcgcatggcagctttacactttttatttacttgtgcaactacatgaaaacaccgagactggcattcgttacagcagatatcttcaaattatgagtgcaaatttcggtgagaagaaagcaaagtggctaggcctatttccaatcttgtacctatcaataggtacatgtgtggctctaaacataatcggaggatcaacatcaaaattatttttccagactgtatgcggtcaatcatgcacagtcaaaacattaacaccagtagaatggtacttggtgtttgcgagcgctgcagttcttctgtctcagctaccaaacttgaactcaattgctggtgtatcacttattggatccatcactgctgtcgtgtattgcacaattatgtggatggtttctgttaacaaggataggttgcctggcataacttacaagccagttcgtggaccaaaggaggttgacaggctctttgaagttcttaattcactcgggatcattgcttttgcatttagaggtcacaatctcgtacttgagatccaggctactatgccctcgagtgagaagcatccctcccgtgtgccgatgtggaagggtgccaaggctgcttatgcagttattgcagcatgtttattcccccttgcaattggaggcttttgggcttacggccaaaggataccaaaaaatggtggcttgcaatcagccttctacgcgtaccgaaggaatgacacctcggaatttatcatgggacttgttagtttacttatcataataaatgctctcagctcattccagatctatgccatgccaatgtttgatgagttggagtcgattttcaccaagaggatgaagaagccatgccaatggtggctccgaataatcctgagggcatttttcggatacggggtcttctttttggccgtcgcaatcccgtctatcgggagtgtgggtggtctggtcggaggaatatcattgccggtcacattggcttacccttgcttcatgtggcttaggatgaagaagccaaagaagtatggcaagatgtggtaccttaattggagcctgggaatcactggtttgattctgagcgtgtcttttatggctgccggagtatatgttataaaagagaatgacagtaaatttgagtggttcaagcccaagtaa

SEQ ID NO: 343 - protein, 456 aa, Populus balsamifera subsp. trichocarpa
  misc_feature: Ceres ANNOT ID no.1460559
  misc_feature: Score of 861.9 for HMM of FIGURE 5.
  misc_feature (30)..(445): Pfam Name: Aa_trans Pfam Description: Transmembrane amino acid transporter protein
  misc_feature: Functional Homolog Of Ceres SEEDLINE ID no. ME06123 at SEQ ID NO. 94
MTPLGSPLRRALQLTKLDPQDAWLPITESRNGNAWYAAFHCLCSGIGFQALVLPVSFTVLGWAWGIIALTVAFAWQLYTFYLLVQLHENTETGIRYSRYLQIMSANFGEKKAKWLGLFPILYLSIGTCVALNIIGGSTSKLFFQTVCGQSCTVKTLTPVEWYLVFASAAVLLSQLPNLNSIAGVSLIGSITAVVYCTIMWMVSVNKDRLPGITYKPVRGPKEVDRLFEVLNSLGIIAFAFRGHNLVLEIQATMPSSEKHPSRVPMWKGAKAAYAVIAACLFPLAIGGFWAYGQRIPKNGGLQSAFYAYRRNDTSEFIMGLVSLLIIINALSSFQIYAMPMFDELESIFTKRMKKPCQWWLRIILRAFFGYGVFFLAVAIPSIGSVGGLVGGISLPVTLAYPCFMWLRMKKPKKYGKMWYLNWSLGITGLILSVSFMAAGVYVIKENDSKFEWFKPK

SEQ ID NO: 344 - DNA, 1853 bp, Panicum virgatum
  misc_feature: Ceres CLONE ID no.1990904
  misc_feature: Encodes the peptide sequence at SEQ ID NO 345
caaccatccagccaaactggtcactggtgactggtgagtagcggcagccggcaccgcacaggtgcggtgcgggcagcagtgagcggagccagagcgggcgccagccaccggagccccgcagcgcggcggccatgtcgtccggcaaggaggccatcagcgaggtgcagtcggcgccgccgacgcccccgcccccgccggtgtccgcgccgccgtcgcgggcgcactcccccgcggcgcacggcggccggtcgtcgccgctgcgcgcgatggcgacgccgctcgcgagccccgtccggaaggcggtggccaccgtgcggggctgcctggaggaggtcggccacatcacgcgcctcgcggacccgcgcgacgcctggctgcccatcaccgagtcccggagcggcaacgcctactacgccgcgttccacaacctcagctccggcgtcgggttccaggcgctcgtgctacccgccgccttcgcctccctcggatggtgcgtgactgcgtggccgtgccggcgacgcacatgcctgcttcttcttcgatcgtcgcgcgcggtggctcacgcgtagcgatgcgttctttggttcctcgcaggacgtgggcgatcatctgcctgacgctggcgttcgcgtggcagctctacacgctgtggctgctcgtcaggcttcacgagcccgtcgcgggcggcgtccgctacagccggtacatgcacctcgccacgacggttttcggcgagcgatgggccaagatcctggcgctgctcccggtgatgtacctgtcggcggggatctgcacggcgctcatcatcgtcggcggcggaagcatgaagatgctgttcggcatcgcgtgcggcgaggcatgcctggcgcggccgctcaccgccgtggagtggtacctggtcttcatctgcgccgccgtgctgctgtcccagctccccaacctcaactccatcgccggcgtgtcgctggtgggcgccaccgccgccgtcgcctactgcaccatgatctgggccgcgtccgtcgccaaggggcgggtgcccggcgtgtcctacgaccccgtcaaggcccccaacgacgtcgacgctgcactgggggtcgtgaatgggctcggaatcattgcctttgctttcagagggcacaatgtcgtactggagattcagggcaccatgccgtcgactctgaagcatccttcacatgtgcccatgtggaagggcgtcaaggtagcctacgccatcgttgcgctctgcttctaccccctggccatcggtggcttctgggcctacggaaaccagatccctccgaacggcatcctgagcgccctgtacaagttccacagccacgatgtgtcccggctggtgctggggatcaccacgctgctggtgatcatcaactgcctgaccacgttccagatctacgccatgcccgtgtacgacaacatggaggccgggtacgtgcaccggaagaaccgtccgtgcccccggtggctgcgctcgggcttccgcgccttcttcggcgccgtcaacttcctcatcgccgtcgcgctgccgttcctgtcggagctcgccggcgtcctgggagggatcgcgcttcccgtcacgctggcgtacccgtgcttcatgtgggtggccatcaagaagccgcgcaagggcacggcgacgtggaacgtcaactgggctctgggcatcctcgggatgagcataagctttgtgctcatagtcgggaacctctggggtctcgtggagaaaggcttgcgtgtcaagttcttcaagcctgcggatgtccagtgaacgcgtgcaaaattgtcaaaaactcggggtctcgattcctaatgaaatatgacgtttggtgttgtgt

SEQ ID NO: 345 - protein, 432 aa, Panicum virgatum
  misc_feature: Ceres CLONE ID no.1990904
  misc_feature: Score of 968.4 for HMM of FIGURE 5.
  misc_feature (51)..(414): Pfam Name: Aa_trans Pfam Description: Transmembrane amino acid transporter protein
  misc_feature: Functional Homolog Of Ceres SEEDLINE ID no. ME06123 at SEQ ID NO. 94
MVRDCVAVPATHMPASSSIVARGGSRVAMRSLVPRRTWAIICLTLAFAWQLYTLWLLVRLHEPVAGGVRYSRYMHLATTVFGERWAKILALLPVMYLSAGICTALIIVGGGSMKMLFGIACGEACLARPLTAVEWYLVFICAAVLLSQLPNLNSIAGVSLVGATAAVAYCTMIWAASVAKGRVPGVSYDPVKAPNDVDAALGVVNGLGIIAFAFRGHNVVLEIQGTMPSTLKHPSHVPMWKGVKVAYAIVALCFYPLAIGGFWAYGNQIPPNGILSALYKFHSHDVSRLVLGITTLLVIINCLTTFQIYAMPVYDNMEAGYVHRKNRPCPRWLRSGFRAFFGAVNFLIAVALPFLSELAGVLGGIALPVTLAYPCFMWVAIKKPRKGTATWNVNWALGILGMSISFVLIVGNLWGLVEKGLRVKFFKPADVQ

SEQ ID NO: 346 - DNA, 1761 bp, Populus balsamifera subsp. trichocarpa
  misc_feature: Ceres ANNOT ID no.1486399
  misc_feature: Encodes the peptide sequence at SEQ ID NO 347
atggaggagagaccagagacggagttaatatccattccagcaacgccacgtgcatcgacgccagagatactgactccttcaggtcagaggtcaccaaggccagcttcaaaggaagcgaaatcatcgacagcatggacaccgacatcgtttatctcgccgaggtttttgagcccaatagggacgccaatgaagagggtgttgattaacatgaagggttatttagaggaagtgggtcatttgactaagctaaatccgcaagatgcttggcttcctatcaccgagtctcgtaatgggaatgctcattatgcggcgtttcataacttgaatgccggtgttgggtttcaagcccttgttttgcctgttgcctttgcttttcttggctgctttcaacatcgaaacctatcacttccatcgaagtttgatgaccaaaaaaagagttggggaatactgtccttaaccatagcctactgctggcaactttacactctatggattctggttcagctgcatgaagctgttcccgggaagagatacaacagatatgtggagcttgcacaagctgcattcggggaaagattaggcctctggcttgcgctcttcccaacagtttatttgtcagctggaaccgcaacagctttgattcttataggaggggagacaatgaaattattcttccaaatagtttgtgggccactctgttcatcaaatcccctaacaacagttgagtggtacctggtattcacttctctatgcatcgttctgtcccagctcccaaatctgaattcaattgcgggactttcactcatcggtgccataacagctatcacttactctaccatggtgtgggttctttctgttagccaacaaaggccacctacaatctcttatgaacccctttctttgccatcctttagtgcttctgtcttttcagtcatgaatgctcttgggattgttgcctttgctttcagagggcacaatctagccatggagattcaggcaacaatgccatcaacatttaagcacccagctcatgtgcccatgtggaaaggagccaaagttgcctatttctttattgctttgtgcctgtttccagtcgccattggaggcttttgggcttatgggaaccttattgtgctgactaaaggcttggctgcaagtattgtcttaggatatccaattcctgatagaatggctatggcttggacttcgtcaaaaactaaaatctcaccattaccatacgatcaagttttctcaattgccttggagaatctaatgccttcaggaggaattctcaatgccctgtatgggtttcacagccacgacattcctcgaggacttcttgcaatgacttttcttctcgtggtgttcaattgcctaagcagcttccagatatattcaatgcctgtttttgacagttttgaagctagctataccacccgaacaaaccgaccatgctccatttgggttcgatccggcttccgggtgttctatggattcatctctttcttcattggggtagcactccctttcctctccagtcttgctggtctcttaggaggattaacactcccagtcacattcgcttacccttgcttcatgtgggttctcataaaaaaaccttccaaatacagtttcaattggtacttcaactggatccttggttggttaggtattgcttttagcttggccttctccattggaggtgtctggagcatggtgaacagtggacttaaattaaaattcttcaagccaccaaattaa

SEQ ID NO: 347 - protein, 517 aa, Populus balsamifera subsp. trichocarpa
  misc_feature: Ceres ANNOT ID no.1486399
  misc_feature: Score of 786.7 for HMM of FIGURE 5.
  misc_feature (91)..(308): Pfam Name: Aa_trans Pfam Description: Transmembrane amino acid transporter protein
  misc_feature: Functional Homolog Of Ceres SEEDLINE ID no. ME06123 at SEQ ID NO. 94
MKGYLEEVGHLTKLNPQDAWLPITESRNGNAHYAAFHNLNAGVGFQALVLPVAFAFLGCFQHRNLSLPSKFDDQKKSWGILSLTIAYCWQLYTLWILVQLHEAVPGKRYNRYVELAQAAFGERLGLWLALFPTVYLSAGTATALILIGGETMKLFFQIVCGPLCSSNPLTTVEWYLVFTSLCIVLSQLPNLNSIAGLSLIGAITAITYSTMVWVLSVSQQRPPTISYEPLSLPSFSASVFSVMNALGIVAFAFRGHNLAMEIQATMPSTFKHPAHVPMWKGAKVAYFFIALCLFPVAIGGFWAYGNLIVLTKGLAASIVLGYPIPDRMAMAWTSSKTKISPLPYDQVFSIALENLMPSGGILNALYGFHSHDIPRGLLAMTFLLVVFNCLSSFQIYSMPVFDSFEASYTTRTNRPCSIWVRSGFRVFYGFISFFIGVALPFLSSLAGLLGGLTLPVTFAYPCFMWVLIKKPSKYSFNWYFNWILGWLGIAFSLAFSIGGVWSMVNSGLKLKFFKPPN

SEQ ID NO: 348 - DNA, 1465 bp, Arabidopsis thaliana
  misc_feature: Ceres CLONE ID no.30044
  misc_feature: Encodes the peptide sequence at SEQ ID NO 349
aaagttgtcctaaaaaaaaccacccctctaaatagggagtgagtgagagagagagtgatagtgagaacaaaaaaaaaacatcatttcttctcgcactcttcacctgctccaatggacgaaagacccgagacagagctaatatcaataccagccacaccacgagtttcaacaccggagattctaactccctccggtcaaagatcacctcgtccggccaccaaaccatcgtcggcgacatggactccgacttcgttcatatcaccgaggttcttgagtccgattggtacaccaatgaaacgagttcttgtgaacatgaaagggtatcttgaagaagttggtcatctcactaagctaaacccacaagatgcttggcttccaatcactgaatctcgtaatggaaacgctcattacgctgcttttcacaatctcaacgctggtgttggttttcaagcccttgttcttcccgtcgcgtttgcgtttcttggctggagttggggaatactgtctttaacaatagcatattgctggcaactctacacactgtggattctggttcagttgcacgaagctgtccccgggaaacgctacaatcgatatgtcgagcttgcacaagctgcttttggagaaaggttaggagtatggcttgcattgtttcctacggtttacttatcagcaggaaccgcgacagcgctgattctgatcggtggagagacaatgaaactcttcttccagatagtttgcggtccattatgcacctcgaatccgttaacaacagttgaatggtatttggtgtttacatctctctgcatcgttctgtctcagctaccaaacctcaattctattgcgggactctccttaataggagcagtgactgcaataacttactccacaatggtttgggttctctctgtgagccaaccaagaccagccactatctcatacgagcctctttctatgccttcgacttctggttcactcttcgctgttttgaatgctcttggcattatagcttttgccttcagaggtcacaacttggttttggaaattcagtcgacgatgccatcaacgtttaagcatcctgctcacgtaccaatgtggagaggagccaaaatctcttacttcctcattgctctgtgtatctttccaatctccatcggaggcttttgggcttatgggaaccttatgccttcaggaggtatgcttgctgctttgtatgcattccacatttacgatatcccgagaggcttattagcgacggcatttctcctagtagtcttcagctgcttgagcagttttcagatatactccatgcctgcctttgacagctttgaagctggctacacaagcagaaccaacaagccgtgttcgatttgggtcagatcaggtttccgagtcttttttggttttgtctcgtttttcatcggtgttgctctcccttttctgtctagtcttgcggggttgctcg

SEQ ID NO: 349 - protein, 451 aa, Arabidopsis thaliana
  misc_feature: Ceres CLONE ID no.30044
  misc_feature: Score of 779.1 for HMM of FIGURE 5.
  misc_feature (94)..(451): Pfam Name: Aa_trans Pfam Description: Transmembrane amino acid transporter protein
  misc_feature: Functional Homolog Of Ceres SEEDLINE ID no. ME06123 at SEQ ID NO. 94
MDERPETELISIPATPRVSTPEILTPSGQRSPRPATKPSSATWTPTSFISPRFLSPIGTPMKRVLVNMKGYLEEVGHLTKLNPQDAWLPITESRNGNAHYAAFHNLNAGVGFQALVLPVAFAFLGWSWGILSLTIAYCWQLYTLWILVQLHEAVPGKRYNRYVELAQAAFGERLGVWLALFPTVYLSAGTATALILIGGETMKLFFQIVCGPLCTSNPLTTVEWYLVFTSLCIVLSQLPNLNSIAGLSLIGAVTAITYSTMVWVLSVSQPRPATISYEPLSMPSTSGSLFAVLNALGIIAFAFRGHNLVLEIQSTMPSTFKHPAHVPMWRGAKISYFLIALCIFPISIGGFWAYGNLMPSGGMLAALYAFHIYDIPRGLLATAFLLVVFSCLSSFQIYSMPAFDSFEAGYTSRTNKPCSIWVRSGFRVFFGFVSFFIGVALPFLSSLAGLL

SEQ ID NO: 350 - DNA, 1741 bp, Triticum aestivum
  misc_feature: Ceres CLONE ID no.910080
  misc_feature: Encodes the peptide sequence at SEQ ID NO 351
atcagcacccaaccgagctcccttgcacacctcctcacaaggtctgggcacctacactggtacagccatagctagctagcgcatactactacaccggagggagcgagcgagcggccatgacgagcgaggtgcagtcggcgccgccgacgccgcggccggtgtccgccccgccgtcgcagatgcactctccggcgcccagccggtcgccgctgcgcgcgatggcgtcgccgctcgccagccccgtgaagaaggcggtggcgagcgtgagggggtacctggaggaggtcgggcacatcaccaagctcgccgacccgcgcgacgcctggctgcccatcaccgcgtccaggagcggcaacgcctactacgccgccttccacaacctcagctccggcgtcggcttccaggcgctcgtgctccccgccgccttcgcctccctcggatgctctacacgctgcggctgctggtgaacctccacgagcccgtcgccggcggcacacgctacagccggtacatgcacctcgccaccaccgtcttcggcgagagatggggcaagatcctggccctgctcccgacgatgtacctgtcggcggggacctgcacggcgctcatcatcgtgggcggcggcagcatgaagatcctcttcagcatcgcgtgcgggccggcgtgcctggcgcggccgccgaccatggtggagtggtacgtcgtcttcgtctgcgtggccgtggtgctgtcccagctccccaacctcaactccatcgccggcgtctccctggtcggggcgacggcggccgtcgggtactgcaccatgatctgggtcatttccgttgccaagggcagggtggccggcgtgtcctacgacccggtcaaggccagcagcgacgtcgacaggacgatcgccgtcctcaatggcctcggcatcatcgcgttcgctttcagggggcacaatcttgtgctcgagattcagggcacaatgccgtcgacgctgaagcacccttctcacgtgcccatgtggaagggcgtcaagttcgcctacctcgtcgtggcgctctgcctctaccccgtcgccatcggcggcttctgggcctacggcaaccagatacctcccaacggaatcctgagcgcgctctacaagttccacagccgcgacgtgtcccggctggttatcggtctcgccaccctgctggtgatcgtgaactgcctgaccacgttccagatctacgcgatgccggtgttcgacaacatggaggccgggtacgtgcacaagaagaaccggccgtgcccgtggtggctgcgcgcgggcttccgcgccttgttcggcgccatcaacctgctcatcgccgtcgcgctgcccttcctgtcggagctggccggcctcctcggcgggatctcgctgccggtcaccctggcctacccgtgcttcatgtggctggcgatcatgaagcccgggaggggcacggcgatgtggtgcgtcaactgggcgctggggtgcctcggcatggggctcagcttcgtcctcatagtcgggaacctctgggggctcgtcgccactggcctgcacgtgcagttcttcaagcccgccgagttccagtgaaactaaagatggaagcaagttttttttttcgagtgaagatggaagcaagtttgctgtctaatccaccaacggaagacatatttatgtgatgtaatgctggcttgtttttcattttgtttctgatgagaaatatactatgtcttgtactgg

SEQ ID NO: 351 - protein, 383 aa, Triticum aestivum
  misc_feature: Ceres CLONE ID no.910080
  misc_feature: Score of 910.6 for HMM of FIGURE 5.
  misc_feature (2)..(365): Pfam Name: Aa_trans Pfam Description: Transmembrane amino acid transporter protein
  misc_feature: Functional Homolog Of Ceres SEEDLINE ID no. ME06123 at SEQ ID NO. 94
MLYTLRLLVNLHEPVAGGTRYSRYMHLATTVFGERWGKILALLPTMYLSAGTCTALIIVGGGSMKILFSIACGPACLARPPTMVEWYVVFVCVAVVLSQLPNLNSIAGVSLVGATAAVGYCTMIWVISVAKGRVAGVSYDPVKASSDVDRTIAVLNGLGIIAFAFRGHNLVLEIQGTMPSTLKHPSHVPMWKGVKFAYLVVALCLYPVAIGGFWAYGNQIPPNGILSALYKFHSRDVSRLVIGLATLLVIVNCLTTFQIYAMPVFDNMEAGYVHKKNRPCPWWLRAGFRALFGAINLLIAVALPFLSELAGLLGGISLPVTLAYPCFMWLAIMKPGRGTAMWCVNWALGCLGMGLSFVLIVGNLWGLVATGLHVQFFKPAEFQ

SEQ ID NO: 352 - protein, 494 aa, Oryza sativa subsp. indica
  misc_feature: Public GI ID no.125536645
  misc_feature: Score of 712.5 for HMM of FIGURE 5.
  misc_feature (360)..(482): Pfam Name: Aa_trans Pfam Description: Transmembrane amino acid transporter protein
  misc_feature: Functional Homolog Of Ceres SEEDLINE ID no. ME06123 at SEQ ID NO. 94
MAMAVEGAGAGVVVSEPEVVSIPPTPRGMSTPEGTATPPPAAGRGAATPARRVVEGLRGYLEEVGHLTRLNPQDAWLPITESRSGNARYAAFHTLNAGLGFQALLLPLAFPALGWRSWGIISLTVAYFWQLYTLWILVKLHEAVPGRRYNRYVELAQAAFAQEIIASGYTKLRTCNVAKILSADLIHLTGEKLGMWLSLFPTIYLSAGSATALILVGGETMKLFYQIVCGPICSPSPISTIEWYLVFTSLAIVLSQLPNLNSIAGVSLIGGTTAITYCTMSWVLSVSQPRPPTVSYEPQAYTSLGSSLFSTLNALGIIAFAFRGHNLALEIQVPQGGMLTALYAFHSHDIPRGLLAATFLLVVFNCLSSFQIYSMPVFDSFEAAYTGRTNRPCSVWVRSGFRVFYGFLSLFISVALPFLSSLAGLLGGLTLPVTFAYPCFMWICIKKPERFSSGWYLNWGLGLLGTAFSLSLCVGGVWSIISSGMKFKFFKPPS

SEQ ID NO: 353 - protein, 336 aa, Gossypium hirsutum
  misc_feature: Public PUBLICCLONE ID no.100065345
  misc_feature: Score of 545.1 for HMM of FIGURE 5.
  misc_feature (4)..(331): Pfam Name: Aa_trans Pfam Description: Transmembrane amino acid transporter protein
  misc_feature: Functional Homolog Of Ceres SEEDLINE ID no. ME06123 at SEQ ID NO. 94
MAAFTLYLLVHLHESPETGMRYSRYLQLCNATFGEKLAKWFALFPILYLSAGTCITLIIIGAQSCRLFFNTVCGGTCSAQPPTNAEWYLIFTSAAVLLSQLPNLNSIAGVSLVGAITAIAYCTLIWVISVVEGRMPGVSYNPVKGRTEVIRIFDILNALGIIAFAFRGHNLILEIQATMPSDEKHPSRVPMWKGVKIAYTLVAMCLFPLAIAGYWAYGQMIPVDGGMLTALFAFHGQDTSQFLLGLTSLCVIISSLSSFQIYGMPAFDDMESLYVKKKKEPSPWWLRLIFRALFGYLCFFAAVAIPFLASFAGLIGGITLPVTLAYPCFMWVKPKA

SEQ ID NO: 354 - protein, 168 aa, Arabidopsis thaliana
  misc_feature: Public GI ID no.21593648
  misc_feature: Functional Homolog Of Ceres SEEDLINE ID no. ME12485 at SEQ ID NO. 107
MTIPTYNLLCIGSFIFLLCFSITFGRKNLLDKPGGTLYTSKPVEAAELRATLVTNTKARDISSNIGLGEVGSQEMHHTYIGTGEDSSLGNKQDNINSVPRKVIRGIVSISFAFPIIKIQVPIPKPNITVAAINQLDEEEMIKGIVITPTKTNELCISLGNYDVELSYS

SEQ ID NO: 355 - DNA, 819 bp, Arabidopsis thaliana
  misc_feature: Ceres CLONE ID no.40875
  misc_feature: Encodes the peptide sequence at SEQ ID NO 356
aattttaaggtggagaaaatgacaataccaacatataaccttttatgcataggatcattcattttcttactatgtttcagcattacctttggtcgcaaaaacctactagacaagcccggtggcactctatatacctccaaacctgttgaagccgccgagcttagagccactttggttactaataccaaagctagagacatttcaagtaatattggtttgggagaggttggaagtcaagagatgcatcacacttacataggaacaggtgaagattcaagtcttggaaataaacaagacaatataaactctgtgcctaggaaggttataagaggtatcgtttccatctcattcgcatttcctatcatcaagattcaggttcctattccgaagccaaatattacggtggctgccataaaccaactcgatgaagaagagatgattaaaggcattgtcataactccaacaaagactaatgagttgtgtatttcccttggaaattacgatgtagagctctcatacagctaaaaacaatttcaagagccgtatgtcgcaggcccattgccagttttctaagggttattctggagatggaagttagtataaaacatatgacgaattgataaagttgatggaagtacttttttttttttggacaaagtacttgatggaagtacttaagttatggttcaagagacaaataagtagttggtgaccaacgagtataaacaaaatatgtagccatctttaacaatgacaaaaggatatatgtgaaccattttgtaatatctatttactatgctataagtacctatgatatat

SEQ ID NO: 356 - protein, 168 aa, Arabidopsis thaliana; identical to SEQ ID NO: 354
  misc_feature: Ceres CLONE ID no.40875
  misc_feature: Functional Homolog Of Ceres SEEDLINE ID no. ME12485 at SEQ ID NO. 107

SEQ ID NO: 357 - protein, 169 aa, Arabidopsis thaliana
  misc_feature: Public GI ID no.15223328
  misc_feature: Functional Homolog Of Ceres SEEDLINE ID no. ME12485 at SEQ ID NO. 107
MTTPTYNLLCIGSFMFLLCFSIGFGRKNLQDKLGDTLFASKPVEATELRAALVSNTEARDISGSIGLGEVGSQEMHHIYIETGEDSSLVNKQDNINSMPRKVIRGTVSISFSFPIIRIKVPIPKPNITVAERNQLNEEEIKGIVITPTKTNEFGLSLGNDGAELGYNYQ

1. A method of producing a plant having increased tolerance to oxidative stress, said method comprising growing a plant cell comprising an exogenous nucleic acid, said exogenous nucleic acid comprising a regulatory region operably linked to a nucleotide sequence encoding a polypeptide, and wherein the HMM bit score of the amino acid sequence encoded by said polypeptide is greater than about 30, said HMM based on the amino acid sequences depicted in one of FIGS. 3, 5 and 8, and wherein said plant has a difference in the level of tolerance to oxidative stress as compared to the corresponding level in tolerance to oxidative stress of a control plant that does not comprise said nucleic acid.

2. The method according to claim 1, wherein the HMM bit score of the amino acid sequence encoded by said polypeptide is greater than about 40, said HMM based on the amino acid sequences depicted in FIG. 3.

3. The method according to claim 1, wherein the HMM bit score of the amino acid sequence encoded by said polypeptide is greater than about 150, said HMM based on the amino acid sequences depicted in FIG. 5.

4. The method according to claim 1, wherein the HMM bit score of the amino acid sequence encoded by said polypeptide is greater than about 100, said HMM based on the amino acid sequences depicted in FIG. 8.

5. A method of producing a plant having increased tolerance to oxidative stress, said method comprising growing a plant cell comprising an exogenous nucleic acid, said exogenous nucleic acid comprising a regulatory region operably linked to a nucleotide sequence encoding a polypeptide having 85 percent or greater sequence identity to an amino acid sequence selected from the group consisting of SEQ ID NOs: 79, 80, 82, 83, 84, 85, 87, 88, 89, 90, 91, 94, 96, 97, 98, 99, 100, 102, 104, 105, 107, 109, 110, 111, 112, 114, 116, 117, 118, 119, 120, 122, 124, 126, 127, 128, 130, 131, 132, 134, 135, 137, 139, 140, 141, 142, 143, 144, 145, 146, 147, 148, 150, 151, 152, 153, 155, 157, 158, 160, 161, 162, 163, 165, 167, 168, 169, 170, 171, 173, 175, 176, 178, 180, 181, 182, 183, 184, 186, 188, 190, 192, 194, 195, 197, 199, 201, 203, 205, 207, 208, 209, 211, 213, 215, 217, 219, 220, 221, 222, 223, 225, 227, 229, 230, 231, 232, 233, 235, 237, 238, 239, 240, 241, 242, 244, 245, 246, 247, 248, 249, 251, 252, 253, 255, 256, 258, 260, 261, 263, 264, 266, 267, 269, 270, 271, 272, 273, 274, 275, 277, 279, 281, 282, 284, 286, 288, 289, 290, 291, 293, 295, 296, 297, 299, 300, 301, 302, 304, 306, 308, 309, 311, 312, 313, 314, 315, 316, 318, 319, 321, 322, 324, 326, 328, 329, 330, 331, 332, 333, 335, 336, 337, 339, 341, 343, 345, 347, 349, 351, 352, 353, 354, 356 and 357, wherein said plant produced from said plant cell has a difference in the level of tolerance to oxidative stress as compared to the corresponding level in a control plant that does not comprise said nucleic acid.

6. A method of producing a plant, said method comprising growing a plant cell comprising an exogenous nucleic acid, said exogenous nucleic acid comprising a regulatory region operably linked to a nucleotide sequence having 85 percent or greater sequence identity to a nucleotide sequence selected from the group consisting of SEQ ID NOs: 78, 81, 86, 92, 93, 95, 101, 103, 106, 108, 113, 115, 121, 123, 125, 129, 133, 136, 138, 149, 154, 156, 159, 164, 166, 172, 174, 177, 179, 185, 187, 189, 191, 193, 196, 198, 200, 202, 204, 206, 210, 212, 214, 216, 218, 224, 226, 228, 234, 236, 243, 250, 254, 257, 259, 262, 265, 268, 276, 278, 280, 283, 285, 287, 292, 294, 298, 303, 305, 307, 310, 317, 320, 323, 325, 327, 334, 338, 340, 342, 344, 346, 348, 350 and 355, wherein a plant produced from said plant cell has a difference in the level of tolerance to oxidative stress as compared to the corresponding level of tolerance to oxidative stress of a control plant that does not comprise said nucleic acid.

7. A method of modulating the level of tolerance to oxidative stress in a plant, said method comprising introducing into a plant cell an exogenous nucleic acid, said exogenous nucleic acid comprising a regulatory region operably linked to a nucleotide sequence encoding a polypeptide, wherein the HMM bit score of the amino acid sequence of said polypeptide is greater than about 30, said HMM based on the amino acid sequences depicted in one of FIGS. 3, 5 and 8, and wherein a plant produced from said plant cell has a difference in the level of tolerance to oxidative stress as compared to the corresponding level in tolerance to oxidative stress of a control plant that does not comprise said exogenous nucleic acid.

8. A method of modulating the level of tolerance to oxidative stress in a plant, said method comprising introducing into a plant cell an exogenous nucleic acid, said exogenous nucleic acid comprising a regulatory region operably linked to a nucleotide sequence encoding a polypeptide having 85 percent or greater sequence identity to an amino acid sequence selected from the group consisting of SEQ ID NOs: 79, 80, 82, 83, 84, 85, 87, 88, 89, 90, 91, 94, 96, 97, 98, 99, 100, 102, 104, 105, 107, 109, 110, 111, 112, 114, 116, 117, 118, 119, 120, 122, 124, 126, 127, 128, 130, 131, 132, 134, 135, 137, 139, 140, 141, 142, 143, 144, 145, 146, 147, 148, 150, 151, 152, 153, 155, 157, 158, 160, 161, 162, 163, 165, 167, 168, 169, 170, 171, 173, 175, 176, 178, 180, 181, 182, 183, 184, 186, 188, 190, 192, 194, 195, 197, 199, 201, 203, 205, 207, 208, 209, 211, 213, 215, 217, 219, 220, 221, 222, 223, 225, 227, 229, 230, 231, 232, 233, 235, 237, 238, 239, 240, 241, 242, 244, 245, 246, 247, 248, 249, 251, 252, 253, 255, 256, 258, 260, 261, 263, 264, 266, 267, 269, 270, 271, 272, 273, 274, 275, 277, 279, 281, 282, 284, 286, 288, 289, 290, 291, 293, 295, 296, 297, 299, 300, 301, 302, 304, 306, 308, 309, 311, 312, 313, 314, 315, 316, 318, 319, 321, 322, 324, 326, 328, 329, 330, 331, 332, 333, 335, 336, 337, 339, 341, 343, 345, 347, 349, 351, 352, 353, 354, 356 and 357, wherein a plant produced from said plant cell has a difference in the level of tolerance to oxidative stress as compared to the corresponding level in tolerance to oxidative stress of a control plant that does not comprise said nucleic acid.

9. The method of claim 8, wherein said polypeptide is selected from the group consisting of SEQ ID NO: 79, 94, 102 and 107, and said plant has a difference in the level of tolerance to oxidative stress as compared to the corresponding level in tolerance to oxidative stress of a control plant that does not comprise said nucleic acid.

10. A method of modulating the level of tolerance to oxidative stress in a plant, said method comprising introducing into a plant cell an exogenous nucleic acid, said exogenous nucleic acid comprising a regulatory region operably linked to a nucleotide sequence having 85 percent or greater sequence identity to a nucleotide sequence selected from the group consisting of SEQ ID NOs: 78, 81, 86, 92, 93, 95, 101, 103, 106, 108, 113, 115, 121, 123, 125, 129, 133, 136, 138, 149, 154, 156, 159, 164, 166, 172, 174, 177, 179, 185, 187, 189, 191, 193, 196, 198, 200, 202, 204, 206, 210, 212, 214, 216, 218, 224, 226, 228, 234, 236, 243, 250, 254, 257, 259, 262, 265, 268, 276, 278, 280, 283, 285, 287, 292, 294, 298, 303, 305, 307, 310, 317, 320, 323, 325, 327, 334, 338, 340, 342, 344, 346, 348, 350 and 355, wherein a plant produced from said plant cell has a difference in the level of tolerance to oxidative stress as compared to the corresponding level in tolerance to oxidative stress of a control plant that does not comprise said nucleic acid.

11. A plant cell comprising an exogenous nucleic acid said exogenous nucleic acid comprising a regulatory region operably linked to a nucleotide sequence encoding a polypeptide, wherein the HMM bit score of the amino acid sequence of said polypeptide is greater than about 30, said HMM based on the amino acid sequences depicted in one of FIGS. 3, 5 and 8, and wherein said plant cell has a difference in the level of tolerance to oxidative stress as compared to the corresponding level in tolerance to oxidative stress of a control plant that does not comprise said nucleic acid.

12. A plant cell comprising an exogenous nucleic acid said exogenous nucleic acid comprising a regulatory region operably linked to a nucleotide sequence encoding a polypeptide having 85 percent or greater sequence identity to an amino acid sequence selected from the group consisting of SEQ ID NOs: 79, 80, 82, 83, 84, 85, 87, 88, 89, 90, 91, 94, 96, 97, 98, 99, 100, 102, 104, 105, 107, 109, 110, 111, 112, 114, 116, 117, 118, 119, 120, 122, 124, 126, 127, 128, 130, 131, 132, 134, 135, 137, 139, 140, 141, 142, 143, 144, 145, 146, 147, 148, 150, 151, 152, 153, 155, 157, 158, 160, 161, 162, 163, 165, 167, 168, 169, 170, 171, 173, 175, 176, 178, 180, 181, 182, 183, 184, 186, 188, 190, 192, 194, 195, 197, 199, 201, 203, 205, 207, 208, 209, 211, 213, 215, 217, 219, 220, 221, 222, 223, 225, 227, 229, 230, 231, 232, 233, 235, 237, 238, 239, 240, 241, 242, 244, 245, 246, 247, 248, 249, 251, 252, 253, 255, 256, 258, 260, 261, 263, 264, 266, 267, 269, 270, 271, 272, 273, 274, 275, 277, 279, 281, 282, 284, 286, 288, 289, 290, 291, 293, 295, 296, 297, 299, 300, 301, 302, 304, 306, 308, 309, 311, 312, 313, 314, 315, 316, 318, 319, 321, 322, 324, 326, 328, 329, 330, 331, 332, 333, 335, 336, 337, 339, 341, 343, 345, 347, 349, 351, 352, 353, 354, 356 and 357, wherein a plant produced from said plant cell has a difference in the level of tolerance to oxidative stress as compared to the corresponding level in tolerance to oxidative stress of a control plant that does not comprise said nucleic acid.

13. A plant cell comprising an exogenous nucleic acid said exogenous nucleic acid comprising a regulatory region operably linked to a nucleotide sequence having 85 percent or greater sequence identity to a nucleotide sequence selected from the group consisting of SEQ ID NO: 78, 81, 86, 92, 93, 95, 101, 103, 106, 108, 113, 115, 121, 123, 125, 129, 133, 136, 138, 149, 154, 156, 159, 164, 166, 172, 174, 177, 179, 185, 187, 189, 191, 193, 196, 198, 200, 202, 204, 206, 210, 212, 214, 216, 218, 224, 226, 228, 234, 236, 243, 250, 254, 257, 259, 262, 265, 268, 276, 278, 280, 283, 285, 287, 292, 294, 298, 303, 305, 307, 310, 317, 320, 323, 325, 327, 334, 338, 340, 342, 344, 346, 348, 350 and 355, wherein a plant produced from said plant cell has a difference in the level of tolerance to oxidative stress as compared to the corresponding level in tolerance to oxidative stress of a control plant that does not comprise said nucleic acid.

14. A transgenic plant comprising the plant cell of claim 11.

15. The transgenic plant of claim 14, wherein said plant is a member of a species selected from the group consisting of Panicum virgatum (switchgrass), Sorghum bicolor (sorghum, sudangrass), Miscanthus giganteus(miscanthus), Saccharum sp. (energycane), Populus balsamifera (poplar), Zea mays (corn), Glycine max (soybean), Brassica napus (canola), Triticum aestivum (wheat), Gossypium hirsutum (cotton), Oryza sativa (rice), Helianthus annuus (sunflower), Medicago sativa (alfalfa), Beta vulgaris (sugarbeet), or Pennisetum glaucum (pearl millet).

16. A product comprising seed or vegetative tissue from a transgenic plant according to claim 11.

17. The product of claim 16, wherein said product is a food or feed product.

18. An isolated nucleic acid comprising a nucleotide sequence encoding a polypeptide having 80% or greater sequence identity to the amino acid sequence set forth in SEQ ID NOs: 79, 94, 102 and 107.

19. A method of identifying whether a polymorphism is associated with variation in a trait, said method comprising:
a) determining whether one or more genetic polymorphisms in a population of plants is associated with the locus for a polypeptide selected from the group consisting of the polypeptides depicted in FIGS. 3, 5 and 8 and functional homologs thereof; and
b) measuring the correlation between variation in said trait in plants of said population and the presence of said one or more polymorphisms in plants of said population, thereby identifying whether or not said one or more polymorphisms are associated with variation in said trait.

20. The method of claim 19, wherein said trait is an increased tolerance to oxidative stress or increased biomass.

21. A method of making a plant line, said method comprising:
a) determining whether one or more genetic polymorphisms in a population of plants is associated with the locus for a polypeptide selected from the group consisting of the polypeptides depicted in FIGS. 3, 5 and 8 and functional homologs thereof;
b) identifying one or more plants in said population in which the presence of at least one allele at said one or more polymorphisms is associated with variation in oxidative stress tolerance;
c) crossing each said one or more identified plants with itself or a different plant to produce seed;
d) crossing at least one progeny plant grown from said seed with itself or a different plant; and
e) repeating steps c) and d) for an additional 0-5 generations to make said plant line, wherein said at least one allele is present in said plant line.

22. (canceled)
